(19) United States
(12) Patent Application Publication
(10) Pub. No.: US 2014/0288097 A1
(43) Pub. Date: Sep. 25, 2014

(54) USE OF TRANSLATIONAL PROFILING TO IDENTIFY TARGET MOLECULES FOR THERAPEUTIC TREATMENT

(71) Applicant: The Regents of the University of California, Oakland, CA (US)

(72) Inventors: Davide Ruggero, San Francisco, CA (US); Andrew Hsieh, San Francisco, CA (US); Merritt Edlind, Berkeley, CA (US); Kevan M. Shokat, San Francisco, CA (US); James Appleman, San Diego, CA (US); Steve Worland, Del Mar, CA (US)

(73) Assignee: The Regents of The University of California, Oakland, CA (US)

(21) Appl. No.: 14/176,018

(22) Filed: Feb. 7, 2014

Related U.S. Application Data
(60) Provisional application No. 61/762,115, filed on Feb. 7, 2013.

(51) Int. Cl. C12Q 1/68

(52) U.S. Cl. CPC C12Q 1/6883
USPC 514/262.1; 506/9; 514/291

(57) ABSTRACT

The present invention provides methods of identifying an agent or drug candidate molecule, validating a target, and identifying normalizing therapeutics that modulates translation, such as in an oncogenic signaling pathway, in a biological sample as determined by translational profiling of one or more genes in the biological sample. The present invention also provides diagnostic and therapeutic methods using the translational profiling methods described herein.

### CROSS-REFERENCE TO RELATED APPLICATIONS

[0001] The present application claims priority to U.S. Provisional Application No. 61/762,115, filed Feb. 7, 2013, the entire content of which is incorporated by reference herein for all purposes.

### STATEMENT AS TO RIGHTS TO INVENTIONS MADE UNDER FEDERALLY SPONSORED RESEARCH AND DEVELOPMENT

[0002] This invention was made with government support under Grant No. RO1 CA154916 awarded by the National Institutes of Health. The government has certain rights in the invention.

### BACKGROUND OF THE INVENTION

[0003] Gene expression studies have been used to examine mRNA in cell populations under different conditions, e.g., for comparing gene expression under different drug treatments or in different cell types. For example, Cheok et al. (Nat. Genet. 34:85-90 (2003)) demonstrated that lymphoid leukemia cells of different molecular subtypes share common pathways of genomic response to the same treatment, and that changes in gene expression are treatment-specific and that gene expression can illuminate differences in cellular response to drug combinations versus single agents. However, these types of gene expression studies have many drawbacks. For example, genome-scale predictions of synthesis rates of mRNAs and proteins have been used to demonstrate that cellular abundance of proteins is predominantly controlled at the level of translation. Schwanhausser et al. (Nature 473:337-342 (2011)).

[0004] The mammalian target of rapamycin (mTOR) kinase is a master regulator of protein synthesis that couples nutrient sensing to cell growth and cancer. However, the downstream translationally regulated nodes of gene expression that may direct cancer development have not been well characterized. Thus, there remains a need for methods of characterizing the translational control of mRNAs in oncogenic mTOR signaling and in cell populations generally. The present invention addresses this need and others.

### BRIEF SUMMARY OF THE INVENTION

[0005] In one aspect, the present invention relates to methods for identifying an agent that modulates an oncogenic signaling pathway (e.g., an agent that inhibits an oncogenic signaling pathway) in a biological sample. In some embodiments, the method comprises:
[0006] (a) contacting the biological sample with an agent;
[0007] (b) determining a first translational profile for the contacted biological sample, wherein the translational profile comprises translational levels for one or more genes having a 5′ terminal oligopyrimidine tract (5′ TOP) and/or a pyrimidine-rich translational element (PRTE); and
[0008] (c) comparing the first translational profile to a second translational profile comprising translational levels for the one or more genes in a control sample that has not been contacted with the agent;
   wherein a difference in the translational levels of the one or more genes in the first translation profile as compared to the second translation profile identifies the agent as a modulator of the oncogenic signaling pathway.

[0009] In some embodiments, the method comprises:
[0010] (a) contacting the biological sample with an agent;
[0011] (b) determining a first translational profile for the contacted biological sample, wherein the translational profile comprises translational levels for one or more genes selected from the group consisting of SEQ ID NOs:1-144; and
[0012] (c) comparing the first translational profile to a second translational profile comprising translational levels for the one or more genes in a control sample that has not been contacted with the agent;
   wherein a difference in the translational levels of the one or more genes in the first translation profile as compared to the second translation profile identifies the agent as a modulator of the oncogenic signaling pathway.

[0013] In some embodiments, the method comprises:
[0014] (a) contacting the biological sample with an agent;
[0015] (b) determining a first translational profile for the contacted biological sample, wherein the translational profile comprises a measurement of gene translational levels for a substantial portion of the genome;
[0016] (c) comparing the first translational profile to a second translational profile comprising a measurement of gene translational levels for the substantial portion of the genome translational levels for the one or more genes in a control sample that has not been contacted with the agent;
[0017] (d) identifying in the first translational profile a plurality of genes having decreased translational levels as compared to the translational levels of the plurality of genes in the second translational profile; and
[0018] (e) determining whether, for the plurality of genes identified in step (d), there is a common consensus sequence and/or regulatory element in the untranslated regions (UTRs) of the genes that is shared by at least 10% of the plurality of genes identified in step (d);
   wherein a decrease in the translational levels of at least 10% of the genes sharing the common consensus sequence and/or UTR regulatory element in the first translational profile as compared to the second translational profile identifies the agent as an inhibitor of an oncogenic signaling pathway.

[0019] In some embodiments, the one or more genes are selected from the genes listed in Table 1, Table 2, and/or Table 3. In some embodiments, the one or more genes are cell invasion and/or metastasis genes. In some embodiments, the one or more genes are selected from Y-box binding protein 1 (YB1), vimentin, metastasis associated 1 (MTA1), and CD44.

[0020] In some embodiments, the oncogenic signaling pathway is the mammalian target of rapamycin (mTOR) pathway, the PI3K pathway, the AKT pathway, the Ras pathway, the Myc pathway, the Wnt pathway, or the BRAF pathway. In some embodiments, the oncogenic signaling pathway is the mTOR pathway.

[0021] In some embodiments, the translational level for the one or more genes is decreased for the first translational profile as compared to the second translational profile, thereby identifying the agent as an inhibitor of the oncogenic signaling pathway. In some embodiments, the translational level of the one or more genes in the first translational profile is decreased by at least three-fold as compared to the second translational profile. In some embodiments, the translational level for the one or more genes is increased for the first translational profile as compared to the second translational profile, thereby identifying the agent as a potentiator of the oncogenic signaling pathway. In some embodiments, the translational level of the one or more genes in the first translational profile is increased by at least three-fold as compared to the second translational profile.

[0022] In some embodiments, the first and/or second translational profiles are generated using ribosomal profiling. In some embodiments, the first and/or second translational profiles are generated using polysome microarray. In some embodiments, the first and/or second translational profiles are generated using immunoassay. In some embodiments, the first and/or second translational profiles are generated using mass spectrometry analysis.

[0023] In some embodiments, the first and/or second translation profile comprises measuring the translational levels of at least 500 genes in the sample (e.g., at least 500, 600, 700, 800, 900, 1000, 2000, 3000, 4000, 5000, 6000, 7000, 8000, 9000, 10,000, 11,000, 12,000, 13,000, 14,000, or 15,000 genes or more). In some embodiments, the first and/or second translational profile comprises a genome-wide measurement of gene translational levels.

[0024] In some embodiments, the biological sample comprises a cell. In some embodiments, the cell is a human cell. In some embodiments, the cell is a cancer cell. In some embodiments, the cancer is prostate cancer, breast cancer, bladder cancer, lung cancer, renal cell carcinoma, endometrial cancer, melanoma, ovarian cancer, thyroid cancer, or brain cancer.

[0025] In some embodiments, the identified agent binds to a 5′ TOP or PRTE sequence in the one or more genes having a different translational level in the first translational profile as compared to the second translational profile. In some embodiments, the identified agent inhibits the activity of a downstream effector of the oncogenic signaling pathway, wherein the effector is 4EBP1, p70S6K1/2, or AKT.

[0026] In some embodiments, the method further comprises chemically synthesizing a structurally related agent derived from the identified agent. In some embodiments, the method further comprises administering the structurally related agent to an animal and determining the oral bioavailability of the structurally related agent. In some embodiments, the method further comprises administering the structurally related agent to an animal and determining the potency of the structurally related agent.

[0027] In another aspect, the present invention relates to a structurally related agent to an agent identified as described herein.

[0028] In still another aspect, the present invention relates to methods of validating a target for therapeutic intervention. In some embodiments, the method comprises:
[0029] (a) contacting a biological sample with an agent that modulates the target;
[0030] (b) determining a first translational profile for the contacted biological sample, wherein the first translational profile comprises translational levels for a plurality of genes; and
[0031] (c) comparing the first translational profile to a second translational profile comprising translational levels for the plurality of genes in a control sample that has not been contacted with the agent;
   wherein identifying one or more genes of a biological pathway as differentially translated in the first translational profile as compared to the second translational profile validates the target for therapeutic intervention, wherein said biological pathway is selected from a protein synthesis pathway, a cell invasion/metastasis pathway, a cellular metabolism pathway, a cell division pathway, an apoptosis pathway, a signal transduction pathway, a cellular transport pathway, a post-translational protein modification pathway, a DNA repair pathway, and a DNA methylation pathway.

[0032] In some embodiments, the one or more genes have a 5′ terminal oligopyrimidine tract (5′ TOP) and/or a pyrimidine-rich translational element (PRTE). In some embodiments, the one or more genes are selected from the group consisting of SEQ ID NOs:1-144.

[0033] In some embodiments, the target for therapeutic intervention is part of an oncogenic signaling pathway. In some embodiments, the oncogenic signaling pathway is the mammalian target of rapamycin (mTOR) pathway. In some embodiments, the target for therapeutic intervention is a protein. In some embodiments, the target for therapeutic intervention is a nucleic acid.

[0034] In some embodiments, one or more genes from each of at least two of the biological pathways is differentially translated in the first translational profile as compared to the second translational profile. In some embodiments, one or more genes from each of at least three of the biological pathways is differentially translated in the first translational profile as compared to the second translational profile. In some embodiments, there is at least a two-fold difference in translational level for the one or more genes in the first translational profile as compared to the second translational profile.

[0035] In some embodiments, the first and/or second translational profile comprises a genome-wide measurement of gene translational levels. In some embodiments, less than 20% of the genes in the genome are differentially translated by at least two-fold in the first translational profile as compared to the second translational profile. In some embodiments, less than 5% of the genes in the genome are differentially translated by at least two-fold in the first translational profile as compared to the second translational profile. In some embodiments, less than 1% of the genes in the genome are differentially translated by at least two-fold in the first translational profile as compared to the second translational profile.

[0036] In some embodiments, the first and/or second translational profiles are generated using ribosomal profiling. In some embodiments, the first and/or second translational profiles are generated using polysome microarray. In some embodiments, the first and/or second translational profiles are generated using immunoassay. In some embodiments, the first and/or second translational profiles are generated using mass spectrometry analysis.

[0037] In some embodiments, the biological sample comprises a cell. In some embodiments, the cell is a human cell. In some embodiments, the cell is a cancer cell. In some embodiments, the cancer is prostate cancer, breast cancer, bladder cancer, lung cancer, renal cell carcinoma, endometrial cancer, melanoma, ovarian cancer, thyroid cancer, or brain cancer.

[0038] In some embodiments, the therapeutic intervention is an anti-cancer therapy.

[0039] In some embodiments, the agent is a peptide, protein, RNA, or small organic molecule. In some embodiments, the agent is an inhibitory RNA.

[0040] In yet another aspect, the present invention relates to methods of identifying a drug candidate molecule. In some embodiments, the method comprises:
[0041] (a) contacting a biological sample with the drug candidate molecule;
[0042] (b) determining a translational profile for the contacted biological sample, wherein the translational profile comprises translational levels for a plurality of genes; and
[0043] (c) comparing the first translational profile to a second translational profile comprising translational levels for the plurality of genes in a control sample that has not been contacted with the drug candidate molecule,
   wherein the drug candidate molecule is identified as suitable for use in a therapeutic intervention when one or more genes of a biological pathway is differentially translated in the first translational profile as compared to the second translational profile, wherein the biological pathway is selected from a protein synthesis pathway, a cell invasion/metastasis pathway, a cellular metabolism pathway, a cell division pathway, an apoptosis pathway, a signal transduction pathway, a cellular transport pathway, a post-translational protein modification pathway, a DNA repair pathway, and DNA methylation pathway.

[0044] In some embodiments, the one or more genes have a 5′ terminal oligopyrimidine tract (5′ TOP) and/or a pyrimidine-rich translational element (PRTE). In some embodiments, the one or more genes are selected from the group consisting of SEQ ID NOs:1-144.

[0045] In some embodiments, one or more genes from each of at least two of the biological pathways is differentially translated in the first translational profile as compared to the second translational profile. In some embodiments, one or more genes from each of at least three of the biological pathways is differentially translated in the first translational profile as compared to the second translational profile. In some embodiments, there is at least a two-fold difference in translational level for the one or more genes in the first translational profile as compared to the second translational profile.

[0046] In some embodiments, the first and/or second translational profile comprises a genome-wide measurement of gene translational levels. In some embodiments, less than 20% of the genes in the genome are differentially translated by at least two-fold in the first translational profile as compared to the second translational profile. In some embodiments, less than 5% of the genes in the genome are differentially translated by at least two-fold in the first translational profile as compared to the second translational profile. In some embodiments, less than 1% of the genes in the genome are differentially translated by at least two-fold in the first translational profile as compared to the second translational profile.

[0047] In some embodiments, the first and/or second translational profiles are generated using ribosomal profiling. In some embodiments, In some embodiments, the first and/or second translational profiles are generated using polysome microarray. In some embodiments, the first and/or second translational profiles are generated using immunoassay. In some embodiments, the first and/or second translational profiles are generated using mass spectrometry analysis.

[0048] In some embodiments, the method further comprises comparing the translational profile for the contacted biological sample with a control translational profile for a second biological sample that has been contacted with a known therapeutic agent. In some embodiments, the known therapeutic agent is a known inhibitor of an oncogenic signaling pathway. In some embodiments, the known therapeutic agent is a known inhibitor of the mammalian target of rapamycin (mTOR) pathway.

[0049] In still another aspect, the present invention relates to methods of identifying a subject as a candidate for treatment with an mTOR inhibitor. In some embodiments, the method comprises:
[0050] (a) determining a first translational profile in a sample from the subject, wherein the first translational profile comprises translational levels for one or more genes having a 5′ terminal oligopyrimidine tract (5′ TOP) and/or a pyrimidine-rich translational element (PRTE); and
[0051] (b) comparing the first translational profile to a second translational profile comprising translational levels for the one or more genes, wherein the second translational profile is from a control sample, wherein the control sample is from a known responder to the mTOR inhibitor prior to administration of the mTOR inhibitor to the known responder;
   wherein a translational level of the one or more genes in the first translational profile that is at least as high as the translational level of the one or more genes in the second translational profile identifies the subject as a candidate for treatment with the mTOR inhibitor.

[0052] In some embodiments, the method comprises:
[0053] (a) determining a first translational profile in a sample from the subject, wherein the first translational profile comprises translational levels for one or more genes selected from the group consisting of SEQ ID NOs:1-144; and
[0054] (b) comparing the first translational profile to a second translational profile comprising translational levels for the one or more genes, wherein the second translational profile is from a control sample, wherein the control sample is from a known responder to the mTOR inhibitor prior to administration of the mTOR inhibitor to the known responder; wherein a translational level of the one or more genes in the first translational profile that is at least as high as the translational level of the one or more genes in the second translational profile identifies the subject as a candidate for treatment with the mTOR inhibitor.

[0055] In some embodiments, the one or more genes are selected from the genes listed in Table 1, Table 2, and/or Table 3. In some embodiments, the one or more genes are cell invasion and/or metastasis genes. In some embodiments, the one or more genes are selected from Y-box binding protein 1 (YB1), vimentin, metastasis associated 1 (MTA1), and CD44.

[0056] In some embodiments, the method comprises:
[0057] (a) determining a first translational profile in a sample from the subject, wherein the first translational profile comprises translational levels for one or more genes of a biological pathway, wherein the biological pathway is selected from a protein synthesis pathway, a cell invasion/metastasis pathway, a cellular metabolism pathway, a cell division pathway, an apoptosis pathway, a signal transduction pathway, a cellular transport pathway, a post-translational protein modification pathway, a DNA repair pathway, and a DNA methylation pathway; and
[0058] (b) comparing the first translational profile to a second translational profile comprising translational levels for the one or more genes, wherein the second translational profile is from a control sample, wherein the control sample is from a known responder to the mTOR inhibitor prior to administration of the mTOR inhibitor to the known responder;
   wherein a translational level of the one or more genes in the first translational profile that is at least as high as the translational level of the one or more genes in the second translational profile identifies the subject as a candidate for treatment with the mTOR inhibitor.

[0059] In some embodiments, the translational level of one or more genes from each of at least two of the biological pathways is at least as high in the first translational profile as in the second translational profile. In some embodiments, the translational level of one or more genes from each of at least three of the biological pathways is at least as high in the first translational profile as in the second translational profile.

[0060] In some embodiments, there is at least a two-fold difference in translational level for the one or more genes in the first translational profile as compared to the second translational profile.

[0061] In some embodiments, the first and/or second translation profile comprises measuring the translational levels of at least 500 genes in the sample (e.g., at least 500, 600, 700, 800, 900, 1000, 2000, 3000, 4000, 5000, 6000, 7000, 8000, 9000, 10,000, 11,000, 12,000, 13,000, 14,000, or 15,000 genes or more). In some embodiments, the first and/or second translational profile comprises a genome-wide measurement of gene translational levels. In some embodiments, the first and second translational profiles are differential profiles from before and after administration of the mTOR inhibitor.

[0062] In some embodiments, the subject has a cancer. In some embodiments, the cancer is prostate cancer, breast cancer, bladder cancer, lung cancer, renal cell carcinoma, endometrial cancer, melanoma, ovarian cancer, thyroid cancer, or brain cancer.

[0063] In some embodiments, the method further comprises administering an mTOR inhibitor to the subject.

[0064] In still another aspect, the present invention relates to methods of identifying a subject as a candidate for treatment with a therapeutic agent. In some embodiments, the method comprises:
[0065] (a) determining a first translational profile in a sample from the subject, wherein the translational profile comprises translational levels for one or more genes of a biological pathway, wherein the biological pathway is selected from a protein synthesis pathway, a cell invasion/metastasis pathway, a cellular metabolism pathway, a cell division pathway, an apoptosis pathway, a signal transduction pathway, a cellular transport pathway, a post-translational protein modification pathway, a DNA repair pathway, and a DNA methylation pathway; and
[0066] (b) comparing the first translational profile to a second translational profile comprising translational levels for the one or more genes, wherein the second translational profile is from a control sample, wherein the control sample is from a known responder to the therapeutic agent prior to administration of the therapeutic agent to the known responder;
   wherein a translational level of the one or more genes that is at least as high as the translational level of the one or more genes in the second translational profile identifies the subject as a candidate for treatment with the therapeutic agent.

[0067] In some embodiments, the translational level of one or more genes from each of at least two of the biological pathways is at least as high in the first translational profile as in the second translational profile. In some embodiments, the translational level of one or more genes from each of at least three of the biological pathways is at least as high in the first translational profile as in the second translational profile.

[0068] In some embodiments, the first and second translational profiles are differential profiles from before and after administration of the therapeutic agent.

[0069] In some embodiments, the subject has a disease. In some embodiments, the disease is cancer. In some embodiments, the cancer is prostate cancer, breast cancer, bladder cancer, lung cancer, renal cell carcinoma, endometrial cancer, melanoma, ovarian cancer, thyroid cancer, or brain cancer. In some embodiments, the biological sample comprises diseased cells.

[0070] In yet another aspect, the present invention relates to methods of treating a subject having a cancer. In some embodiments, the method comprises:
[0071] administering an mTOR inhibitor to a subject that has been selected as having a first translational profile comprising a translational level of one or more genes that is at least as high as the translational level of the one or more genes in a second translational profile from a control sample;
[0072] wherein the first and second translational profiles comprise translational levels for one or more genes having a 5′ terminal oligopyrimidine tract (5′ TOP) and/or a pyrimidine-rich translational element (PRTE); and wherein the control sample is from a known responder to the mTOR inhibitor prior to administration of the mTOR inhibitor to the known responder;
[0073] thereby treating the cancer in the subject.

[0074] In some embodiments, the method of treating a subject having a cancer comprises:
[0075] administering an mTOR inhibitor to a subject that has been selected as having a first translational profile comprising a translational level of one or more genes that is at least as high as the translational level of the one or more genes in a second translational profile from a control sample;
[0076] wherein the first and second translational profiles comprise translational levels for one or more genes selected from the group consisting of SEQ ID NOs:1-144; and wherein the control sample is from a known responder to the mTOR inhibitor prior to administration of the mTOR inhibitor to the known responder;
[0077] thereby treating the cancer in the subject.

[0078] In some embodiments, the one or more genes are selected from the genes listed in Table 1, Table 2, and/or Table 3. In some embodiments, the one or more genes are cell invasion and/or metastasis genes. In some embodiments, the one or more genes are selected from Y-box binding protein 1 (YB1), vimentin, metastasis associated 1 (MTA1), and CD44.

[0079] In some embodiments, the method of treating a subject having a cancer comprises:
[0080] administering an mTOR inhibitor to a subject that has been selected as having a first translational profile comprising a translational level of one or more genes that is at least as high as the translational level of the one or more genes in a second translational profile from a control sample;
[0081] wherein the first and second translational profiles comprise translational levels for one or more genes of a biological pathway selected from a protein synthesis pathway, a cell invasion/metastasis pathway, a cellular metabolism pathway, a cell division pathway, an apoptosis pathway, a signal transduction pathway, a cellular transport pathway, a post-translational protein modification pathway, a DNA repair pathway, and a DNA methylation pathway; and wherein the control sample is from a known responder to the mTOR inhibitor prior to administration of the mTOR inhibitor to the known responder;
[0082] thereby treating the cancer in the subject.

[0083] In some embodiments, the translational level of one or more genes from each of at least two of the biological pathways is at least as high in the first translational profile as in the second translational profile. In some embodiments, the translational level of one or more genes from each of at least three of the biological pathways is at least as high in the first translational profile as in the second translational profile.

[0084] In some embodiments, the first and/or second translation profile comprises measuring the translational levels of at least 500 genes in the sample (e.g., at least 500, 600, 700, 800, 900, 1000, 2000, 3000, 4000, 5000, 6000, 7000, 8000, 9000, 10,000, 11,000, 12,000, 13,000, 14,000, or 15,000 genes or more). In some embodiments, the first and/or second translational profile comprises a genome-wide measurement of gene translational levels. In some embodiments, the first and second translational profiles are differential profiles from before and after administration of the mTOR inhibitor.

[0085] In some embodiments, the subject has a cancer. In some embodiments, the cancer is prostate cancer, breast cancer, bladder cancer, lung cancer, renal cell carcinoma, endometrial cancer, melanoma, ovarian cancer, thyroid cancer, or brain cancer. In some embodiments, the cancer is an invasive cancer.

[0086] In some embodiments, the method further comprises monitoring the translational levels of the one or more genes in the subject subsequent to administering the mTOR inhibitor.

[0087] In still another aspect, the present invention relates to methods of treating a subject in need thereof. In some embodiments, the method comprises:
[0088] administering a therapeutic agent to a subject that has been selected as having a first translational profile comprising a translational level of one or more genes that is at least as high as the translational level of the one or more genes in a second translational profile;
[0089] wherein the first and second translational profiles comprise translational levels for one or more genes of a biological pathway selected from a protein synthesis pathway, a cell invasion/metastasis pathway, a cellular metabolism pathway, a cell division pathway, an apoptosis pathway, a signal transduction pathway, a cellular transport pathway, a post-translational protein modification pathway, a DNA repair pathway, and a DNA methylation pathway; and wherein the control sample is from a known responder to the therapeutic agent prior to administration of the therapeutic agent to the known responder;
[0090] thereby treating the subject.

[0091] In some embodiments, the translational level of one or more genes from each of at least two of the biological pathways is at least as high in the first translational profile as in the second translational profile. In some embodiments, the translational level of one or more genes from each of at least three of the biological pathways is at least as high in the first translational profile as in the second translational profile.

[0092] In some embodiments, the first and second translational profiles are differential profiles from before and after administration of the therapeutic agent.

[0093] In some embodiments, the subject in need of treatment has a disease. In some embodiments, the disease is cancer. In some embodiments, the cancer is prostate cancer, breast cancer, bladder cancer, lung cancer, renal cell carcinoma, endometrial cancer, melanoma, ovarian cancer, thyroid cancer, or brain cancer. In some embodiments, the cancer is an invasive cancer. In some embodiments, the biological sample comprises diseased cells.

[0094] In still another aspect, the present invention relates to methods of identifying an agent for normalizing a translational profile in a subject in need thereof. In some embodiments, the method comprises:
[0095] (a) determining a first translational profile for a first biological sample from the subject, wherein the first translational profile comprises translational levels for a plurality of genes;
[0096] (b) comparing the first translational profile to a second translational profile comprising translational levels for the plurality of genes, wherein the second translational profile is from a control sample, wherein the control sample is from a non-diseased subject;
[0097] (c) identifying one or more genes of a biological pathway as differentially translated in the first translational profile as compared to the second translational profile, wherein the biological pathway is selected from a protein synthesis pathway, a cell invasion/metastasis pathway, a cellular metabolism pathway, a cell division pathway, an apoptosis pathway, a signal transduction pathway, a cellular transport pathway, a post-translational protein modification pathway, a DNA repair pathway, and a DNA methylation pathway;
[0098] (d) contacting a second biological sample from the subject with the agent;
[0099] (e) determining a third translational profile for the second biological sample, wherein the third translational profile comprises translational levels for the one or more genes identified as differentially translated in the first translational profile as compared to the second translational profile; and
[0100] (f) comparing the translational levels for the one or more genes in the third translational profile to the translational levels for the one or more genes in the first and second translational profiles;
[0101] wherein a translational level for the one or more genes in the third translational profile that is closer to the translational level for the one or more genes in the second translational profile than to the translational level for the one or more genes in the first translational profile identifies the agent as an agent for normalizing the translational profile in the subject.

[0102] In yet another aspect, the present invention relates to methods of normalizing a translational profile in a subject in need thereof. In some embodiments, the method comprises:
[0103] administering to the subject an agent that has been selected as an agent that normalizes the translational profile in the subject, wherein the agent is selected by:
   [0104] (a) determining a first translational profile for a first biological sample from the subject, wherein the first translational profile comprises translational levels for a plurality of genes;
   [0105] (b) comparing the first translational profile to a second translational profile comprising translational levels for the plurality of genes, wherein the second translational profile is from a control sample, wherein the control sample is from a non-diseased subject;
   [0106] (c) identifying one or more genes of a biological pathway as differentially translated in the first translational profile as compared to the second translational profile, wherein the biological pathway is selected from a protein synthesis pathway, a cell invasion/metastasis pathway, a cellular metabolism pathway, a cell division pathway, an apoptosis pathway, a signal transduction pathway, a cellular transport pathway, a post-translational protein modification pathway, a DNA repair pathway, and a DNA methylation pathway;
   [0107] (d) contacting a second biological sample form the subject with the agent;
   [0108] (e) determining a third translational profile for the second biological sample, wherein the third translational profile comprises translational levels for the one or more genes identified as differentially translated in the first translational profile as compared to the second translational profile; and
   [0109] (f) comparing the translational levels for the one or more genes in the third translational profile to the translational levels for the one or more genes in the first and second translational profiles; wherein a translational level for the one or more genes in the third translational profile that is closer to the translational level for the one or more genes in the second translational profile than to the translational level for the one or more genes in the first translational profile identifies the agent as an agent for normalizing the translational profile in the subject;
[0110] thereby normalizing the translational profile in the subject.

[0111] In some embodiments, one or more genes from each of at least two of the biological pathways is differentially translated in the first translational profile as compared to the second translational profile. In some embodiments, one or more genes from each of at least three of the biological pathways is differentially translated in the first translational profile as compared to the second translational profile. In some embodiments, there is at least a two-fold difference in translational level for the one or more genes in the first translational profile as compared to the second translational profile.

[0112] In some embodiments, the first and/or second translation profile comprises measuring the translational levels of at least 500 genes in the sample (e.g., at least 500, 600, 700, 800, 900, 1000, 2000, 3000, 4000, 5000, 6000, 7000, 8000, 9000, 10,000, 11,000, 12,000, 13,000, 14,000, or 15,000 genes or more). In some embodiments, the first, second, and/or third translational profiles comprise a genome-wide measurement of gene translational levels.

[0113] In some embodiments, the agent is a peptide, protein, inhibitory RNA, or small organic molecule.

[0114] In still another aspect, the present invention relates to methods for identifying a candidate therapeutic for treating a disease. In some embodiments, the method comprises:
[0115] (a) determining a first translational profile for a plurality of genes for a disease sample that has been contacted with a candidate agent;
[0116] (b) determining a second translational profile for a plurality of genes for a disease sample that has not been contacted with a candidate agent; and
[0117] (c) identifying the agent as a candidate therapeutic for treating the disease when one or more genes are differentially translated in the first translation profile as compared to the second translation profile and when the differential translation results in a biological benefit.

[0118] In some embodiments, the method for identifying a candidate therapeutic for treating a disease comprises:
[0119] (a) determining a first translational profile for a plurality of genes for a disease sample that has been contacted with a candidate agent;
[0120] (b) determining a second translational profile for a plurality of genes for a disease sample that has been contacted with a known active compound for treating the disease; and
[0121] (c) identifying the agent as a candidate therapeutic for use in treating the disease when the first translational profile is comparable to the second translational profile.

[0122] In some embodiments, the method for identifying a candidate therapeutic for treating a disease comprises:
[0123] (a) determining three independent translational profiles, each for a plurality of genes from a disease sample, wherein (i) a first translational profile is from a sample not contacted with any compound; (ii) a second translational profile is from a sample that has been contacted with a known active compound for treating the disease; and (iii) a third translational profile is from a sample that has been contacted with a candidate agent;
[0124] (b) identifying one or more genes as differentially translated in the first translational profile as compared to the second translational profile; and
[0125] (c) identifying the agent as a candidate therapeutic for use in treating the disease when the one or more differentially translated genes from step (b) are in the third translational profile and when the translational profile of the one or more genes in the third translational profile is closer to the translational profile of the one or more genes in the second translational profile than to the translational profile of the one or more genes in the first translational profile.

[0126] In some embodiments, the method for identifying a candidate therapeutic for treating a disease comprises:
[0127] (a) determining three independent translational profiles, each for a plurality of genes from a disease sample, wherein (i) a first translational profile is from a sample not contacted with any compound; (ii) a second translational profile is from a sample that has been contacted with a known active compound for treating the disease; and (iii) a third translational profile is from a sample that has been contacted with a candidate agent;
[0128] (b) determining a first differential translational profile comprising one or more genes differentially translated in the first translational profile as compared to the second translational profile, and determining a second differential translational profile comprising one or more genes differentially translated in the first translational profile as compared to the third translational profile; and
[0129] (c) identifying the agent as a candidate therapeutic for use in treating the disease when the first differential translational profile is comparable to the second differential translational profile.

[0130] In yet another aspect, the present invention relates to methods for identifying a candidate molecule for normalizing a translational profile associated with a disease. In some embodiments, the method comprises:
[0131] (a) determining a first translational profile for a plurality of genes from a disease sample that has been contacted with a candidate agent;
[0132] (b) determining a second translational profile for a plurality of genes from (i) a control non-diseased sample or (2) a control non-diseased sample that has been contacted with the candidate agent; and
[0133] (c) identifying the agent as a candidate therapeutic for normalizing a translational profile associated with the disease when the first translational profile is comparable to the second translational profile.

[0134] In some embodiments, the method for identifying a candidate molecule for normalizing a translational profile associated with a disease comprises:
[0135] (a) determining three independent translational profiles, each for a plurality of genes, wherein (i) a first translational profile is from a disease sample, (ii) a second translational profile is from (1) a control non-diseased sample or (2) a control non-diseased sample that has been contacted with a candidate agent, and (iii) a third translational profile is from a disease sample that has been contacted with the candidate agent;
[0136] (b) identifying one or more genes as differentially translated in the first translational profile as compared to the second profile; and
[0137] (c) identifying the agent as a candidate therapeutic for normalizing a translational profile associated with the disease when the one or more differentially translated genes from step (b) are in the third translational profile and when the translational profile of the one or more genes in the third translational profile is closer to the translational profile of the one or more genes in the second translational profile than to the translational profile of the one or more genes in the first translational profile.

[0138] In some embodiments, the method for identifying a candidate molecule for normalizing a translational profile associated with a disease comprises:
[0139] (a) determining three independent translational profiles, each for a plurality of genes, wherein (i) a first translational profile is from a disease sample, (ii) a second translational profile is from (1) a control non-diseased sample or (2) a control non-diseased sample that has been contacted with a candidate agent, and (iii) a third translational profile is from a disease sample that has been contacted with the candidate agent;
[0140] (b) determining a first differential translational profile comprising one or more genes differentially translated in the first translational profile as compared to the second translational profile, and determining a second differential translational profile comprising one or more genes differentially translated in the first translational profile as compared to the third translational profile; and
[0141] (c) identifying the agent as a candidate therapeutic for normalizing a translational profile associated with the disease when the first differential translational profile is comparable to the second differential translational profile.

[0142] In still another aspect, the present invention provides methods of validating a target for therapeutic intervention in disease. In some embodiments, the method comprises:
[0143] (a) determining a first translational profile for a plurality of genes from a disease sample that has been contacted with an agent that modulates a disease-associated target;
[0144] (b) determining a second translational profile for a plurality of genes from a control disease sample that has not been contacted with the agent; and
[0145] (c) validating the target for therapeutic intervention in the disease when one or more genes are differentially translated in the first translational profile as compared to the second translational profile and when the differential translation results in a biological benefit.

[0146] In some embodiments, the method of validating a target for therapeutic intervention in disease comprises:
[0147] (a) determining a first translational profile for a plurality of genes from a disease sample that has been contacted with an agent that modulates a disease-associated target;
[0148] (b) determining a second translational profile for a plurality of genes from a control disease sample that has been contacted with a known active compound for treating the disease; and
[0149] (c) validating the target as a target for therapeutic intervention in the disease when the first translational profile is comparable to the second translational profile.

[0150] In some embodiments, the method of validating a target for therapeutic intervention in disease comprises:
[0151] (a) determining three independent translational profiles, each for a plurality of genes from a disease sample, wherein (i) a first translational profile is from a sample not contacted with any compound, (ii) a second translational profile is from a sample contacted with an agent that modulates a disease-associated target, and (iii) a third translational profile is from a sample contacted with a known active compound for treating the disease;
[0152] (b) identifying one or more genes as differentially translated in the first translational profile as compared to the second translational profile; and
[0153] (c) validating the target as a target for therapeutic intervention in the disease when the one or more differentially translated genes from step (b) are in the third translational profile and when the translational profile of the one or more genes in the third translational profile is closer to the translational profile of the one or more genes in the second translational profile than to the translational profile of the one or more genes in the first translational profile.

[0154] In some embodiments, the method of validating a target for therapeutic intervention in disease comprises:
[0155] (a) determining three independent translational profiles, each for a plurality of genes from a disease sample, wherein (i) a first translational profile is from a sample not contacted with any compound, (ii) a second translational profile is from a sample contacted with an agent that modulates a disease-associated target, and (iii) a third translational profile is from a sample contacted with a known active compound for treating the disease;
[0156] (b) determining a first differential translational profile comprising one or more genes differentially translated in the first translational profile as compared to the second translational profile, and determining a second differential translational profile comprising one or more genes differentially translated in the first translational profile as compared to the third translational profile; and
[0157] (c) validating the target as a target for therapeutic intervention in the disease when the first differential translational profile is comparable to the second differential translational profile.

[0158] In still another aspect, the present invention provides methods for validating a target for normalizing a translational profile associated with a disease. In some embodiments, the method comprises:
[0159] (a) determining a first translational profile for a plurality of genes from a disease sample that has been contacted with an agent that modulates a disease-associated target;
[0160] (b) determining a second translational profile for a plurality of genes from (i) a control non-diseased sample or (ii) a control non-diseased sample that has been contacted with the agent that modulates a disease-associated target; and
[0161] (c) validating the target as a target for normalizing a translational profile associated with the disease when the first translational profile is comparable to the second translational profile.

[0162] In some embodiments, the method for validating a target for normalizing a translational profile associated with a disease comprises:
[0163] (a) determining three independent translational profiles, each for a plurality of genes, wherein (i) a first translational profile is from a disease sample, (ii) a second translational profile is from (1) a control non-diseased sample or (2) a control non-diseased sample that has been contacted with an agent that modulates a disease-associated target, and (iii) a third translational profile is from a disease sample that has been contacted with the agent that modulates the disease-associated target;
[0164] (b) identifying one or more genes as differentially translated in the first translational profile as compared to the second translational profile; and
[0165] (c) validating the target as a target for normalizing a translational profile associated with the disease when the one or more differentially translated genes from step (b) are in the third translational profile and when the translational profile of the one or more genes in the third translational profile is closer to the translational profile of the one or more genes in the second translational profile than to the translational profile of the one or more genes in the first translational profile.

[0166] In some embodiments, the method for validating a target for normalizing a translational profile associated with a disease comprises:
[0167] (a) determining three independent translational profiles, each for a plurality of genes, wherein (i) a first translational profile is from a disease sample, (ii) a second translational profile is from (1) a control non-diseased sample or (2) a control non-diseased sample that has been contacted with an agent that modulates a disease-associated target, and (iii) a third translational profile is from a disease sample that has been contacted with the agent that modulates the disease-associated target;
[0168] (b) determining a first differential translational profile comprising one or more genes differentially translated in the first translational profile as compared to the second translational profile, and determining a second differential translational profile comprising one or more genes differentially translated in the first translational profile as compared to the third translational profile; and
[0169] (c) validating the target as a target for normalizing a translational profile associated with the disease when the first differential translational profile is comparable to the second differential translational profile.

[0170] In yet another aspect, the present invention provides methods of identifying a subject as a candidate for treating a disease with a therapeutic agent. In some embodiments, the method comprises:
[0171] (a) determining a first translational profile for a plurality of genes in a sample from a subject having or suspected of having a disease selected from a cancer, an inflammatory disease, an autoimmune disease, a neurodegenerative disease, a neurodevelopmental disease, a metabolic disease, and a viral infection;
[0172] (b) determining a second translational profile for a plurality of genes in a control sample, wherein the control sample is from a subject known to respond to the therapeutic agent and wherein the sample has not been contacted with the therapeutic agent; and
[0173] (c) identifying the subject as a candidate for treating the disease with the therapeutic agent when the first translational profile is comparable to the second translational profile.

[0174] In another aspect, the present invention provides methods for treating a disease (e.g., a cancer, an inflammatory disease, an autoimmune disease, a neurodegenerative disease, a neurodevelopmental disease, a metabolic disease, or a viral infection) comprising administering a therapeutic agent to a subject identified according to any of the methods described herein.

[0175] In still another aspect, the present invention provides methods for treating a disease (e.g., a cancer, an inflammatory disease, an autoimmune disease, a neurodegenerative disease, a neurodevelopmental disease, a metabolic disease, or a viral infection) comprising administering to a subject having the disease a therapeutic agent identified according to any of the methods described herein.

[0176] In still yet another aspect, the present invention provides methods for treating a disease (e.g., a cancer, an inflammatory disease, an autoimmune disease, a neurodegenerative disease, a neurodevelopmental disease, a metabolic disease, or a viral infection) comprising administering to a subject having the disease an agent that modulates a disease-associated target, wherein the target was validated according to any of the methods described herein.

[0177] In yet another aspect, the present invention provides methods for treating a disease (e.g., a cancer, an inflammatory disease, an autoimmune disease, a neurodegenerative disease, a neurodevelopmental disease, a metabolic disease, or a viral infection) by normalizing the disease translational profile, comprising administering to a subject having the disease a therapeutic agent identified according to any of the methods described herein.

### BRIEF DESCRIPTION OF THE DRAWINGS

[0178] FIG. 1. Ribosome profiling reveals mTOR-dependent specialized translational control of the prostate cancer genome. (a) Representative comparison of mRNA abundance and translational efficiency after a 3 hr treatment with an ATP site inhibitor (PP242) versus an allosteric inhibitor (rapamycin). (b-d) Free energy, length and percentage G+C content of the 5′ UTRs of mTOR target versus non-target mRNAs (error bars indicate range, non-target n=5,022, target n=144, two-sided Wilcoxon). (e) Functional classification of translationally regulated mTOR-responsive mRNAs. (f) Chemical structure of INK128. (g) Representative Western blot from three independent experiments of mTOR-sensitive invasion genes in PC3 cells after a 48-hr drug treatment. Rapa: rapamycin.

[0179] FIG. 2. mTOR promotes prostate cancer cell migration and invasion through a translationally regulated gene signature. (a) Matrigel invasion assay in PC3 cells: 6-hr pre-treatment followed by 6 hr of cell invasion (n=6, ANOVA). (b, c) Migration patterns and average distance traveled by GFP-labeled PC3 cells during hours 3-4 and 6-7 of drug treatment (n=34 cells per condition, ANOVA). (d) Matrigel invasion assay in PC3 cells after 48 hr of knockdown of YB1, MTA1, CD44, or vimentin followed by 24 hr of cell invasion (n=7, t-test). (e) Matrigel invasion assay in BPH-1 cells after 48 hr of overexpression of YB1 and/or MTA1, followed by cell invasion for 24 hr (n=7, t-test). Rapa: rapamycin. All data represent mean±s.e.m. NS: not statistically significant.

[0180] FIG. 3. The 4EBP1-eIF4E axis controls the post-transcriptional expression of mTOR-sensitive invasion genes. (a) Schematic of the pharmacogenetic strategy to inhibit p70S6K1/2 or eIF4E hyperactivation. (b) Representative Western blot from three independent experiments of PC3 4EBP1M cells after 48-hr doxycycline induction of 4EBP1^{M}. (c) Representative Western blot from three independent experiments of PC3 cells after 48-hr DG-2 treatment. (d) Representative Western blot from three independent experiments of PC3 cells after 48 h of 4EBP1/4EBP2 knockdown followed by 24-hr treatment with an ATP site inhibitor of mTOR (see quantification of independent experiments in FIG. 21a). (e) Representative Western blot from three independent experiments of wild-type (WT) and 4EBP1/4EBP2 double knockout (DKO) MEFs treated with an ATP site inhibitor of mTOR for 24 hr. (f) Representative Western blot from two independent experiments of wild-type and mSin1^{-/-} (also called Mapkap1^{tm1Bisu}) MEFs after 24-hr treatment with an ATP site inhibitor of mTOR. (g) Matrigel invasion assay upon 48-hr doxycycline induction of 4EBP1^{M}, or treatment with DG-2 compared to control (n=6 per condition, t-test). All data represent mean±s.e.m.

[0181] FIG. 4. mTOR hyperactivation augments translation of YB1, MTA1, CD44, and vimentin mRNAs in a subset of pre-invasive prostate cancer cells in vivo. Left: immunofluorescent images of CK8/DAPI or CK5/DAPI with YB1 (a, b), MTA1 (c, d), or CD44 (e, f) co-staining in 14-month-old wild-type and Pten^{L/L} mouse prostate epithelial cells. White boxes outline the area magnified in the right panel. Right: magnified immunofluorescent images of YB1 (a, b), MTA1 (c, d) and CD44 (e, f) co-stained with DAPI in wild-type and Pten^{L/L} mouse prostate epithelial cells. Dotted lines encircle the cytoplasm (C) and/or the nucleus (N). (g) Representative immunofluorescent images of CK5 or CK8 co-staining with vimentin in 14-month-old wild-type and Pten^{L/L} mouse prostate epithelial cells. S: stroma; yellow arrows indicate perinuclear vimentin. (h) Box plot of YB1 (N=nuclear, C=cytoplasmic), MTA1, and CD44 mean fluorescence intensity (m.f.i.) per CK5⁺ or CK8⁺ prostate epithelial cell in wild-type and Pten^{L/L} mice (three mice per arm, n=43-303 cells quantified per target gene, error bars indicate range (see FIG. 23b); *P<0.0001, **P=0.0004, t-test).

[0182] FIG. 5. Complete mTOR inhibition by treatment with an ATP site inhibitor of mTOR prevents prostate cancer invasion and metastasis in vivo. (a) Diagram and images of normal prostate gland, pre-invasive PIN, and invasive prostate cancer. CK8/CK5, luminal/basal epithelial cells, respectively. Yellow arrowheads indicate invasive front. (b) Immunofluorescent images of 14-month-old Pten^{L/L} lymph node (LN) metastasis co-stained with CK8/androgen receptor (AR), CK8/YB1, and CK8/MTA1. (c) Left: human tissue microarray of YB1 protein levels in normal (n=59), PIN (n=5), cancer (n=99), and CRPC (n=3) (ANOVA). Right: immunohistochemistry of YB1 in human CRPC demarcated by the red line (inset shows nuclear and cytoplasmic YB1). (d) Quantification of invasive prostate glands in wild-type and Pten^{L/L} mice before (12-months old) and after (14-months old) 60 days of treatment with an ATP site inhibitor of mTOR (n=6 mice per arm, ANOVA). (e, f) Area and number of CK8/AR+ metastases in draining lymph nodes in 14-month-old Pten^{L/L} mice after 60 days of treatment with an ATP site inhibitor of mTOR (n=6 mice per arm, t-test). (g) Percentage decrease of YB1 (N=nuclear, C=cytoplasmic), MTA1, CD44, or vimentin protein levels (determined by quantitative immunofluorescence, see FIG. 23b) in CK8⁺ or CK5⁺ prostate cells (CK8′ only for vimentin) in ATP site inhibitor of mTOR-treated 14-month-old Pten^{L/L} mice normalized to vehicle-treated mice (n=3 mice per arm, t-test). All data represent mean±s.e.m.

[0183] FIG. 6. Validation of mTOR inhibitors in PC3 prostate cancer cell line. (a) Schematic of ribosome profiling of human prostate cancer cells. (b) Representative Western blot analysis from 3 independent experiments of PC3 prostate cancer cells treated with rapamycin (50 nM), PP242 (2.5 μM), or ATP site inhibitor of mTOR (200 nM) for 3 hours. (c) Representative [³⁵S]-methionine incorporation in PC3 cells after 6-hour treatment with rapamycin (50 nM) or an ATP site inhibitor of mTOR (200 nM) (left panel). Quantification of [³⁵S]-methionine incorporation (right panel, n=4, mean+SEM). (d) Representative [³⁵S]-methionine incorporation in PC3 cells after 14-hour treatment with rapamycin (50 nM) or an ATP site inhibitor of mTOR (200 nM) (left panel). Quantification of [³⁵S]-methionine incorporation (right panel, n=4, mean+SEM, * P<0.05 ANOVA). (e) Cell cycle analysis of PC3 cells after treatment with rapamycin (50 nM), PP242 (2.5 μM), or an ATP site inhibitor of mTOR (200 nM) for 48 hours (mean+SEM, n=3, * P<0.001 ANOVA). (f) Cell cycle analysis of PC3 cells after 0-, 6-, or 24-hour treatment with an ATP site inhibitor of mTOR (200 nM) (mean+SEM, n=3, * P<0.001 ANOVA). n.s.: not statistically significant. V: vehicle; R: rapamycin; I: ATP site inhibitor of mTOR.

[0184] FIG. 7. Inter-experimental correlation of ribosome profiling per treatment condition and tally of mTOR responsive genes. (a) Correlation plots from 2 independent ribosome profiling experiments after a 3-hour treatment with rapamycin (50 nM) or PP242 (2.5 μM). (b) Number of translationally and transcriptionally regulated mRNA targets of mTOR after 3-hour drug treatments. (c) The Pyrimidine Rich Translational Element (PRTE) (SEQ ID NO:145) is present within the 5′ UTRs of 63% of mTOR-responsive translationally regulated mRNAs. (d) Venn diagram of the number of mTOR sensitive genes that possess a PRTE (red), 5′ TOP (green), or both (yellow).

[0185] FIG. 8. Read count profiles for eEF2, vimentin, SLC38A2, and PAICS. (a) Ribosome footprint and RNA-Seq profiles for eEF2. Read count profiles are shown for each nucleotide position in the uc0021ze.2 transcript, with the eEF2 coding sequence marked. Ribosome footprints were assigned to specific A site nucleotide positions based on their length. (b) Ribosome footprint and RNA-Seq profiles for vimentin. (c) Ribosome footprint and RNA-Seq profiles for SLC38A2. (d) Ribosome footprint and RNA-Seq profiles for PAICS.

[0186] FIG. 9. False Discovery Rate computation. (a) The cumulative distribution of log₂ fold-change values is shown for three comparisons, considering only genes passing the minimum read count criterion in that comparison. The DMSO replicate represents a comparison of full biological replicates of the control DMSO-only treatment condition. The rapamycin and PP242 conditions show the ratio of drug-treated to DMSO-treated samples within a single experiment. The fold-change threshold chosen based on PP242 translational repression, described below, is shown. (b) The extremes of the log₂ fold-change cumulative distributions, showing the complementary cumulative distribution function for positive extreme values on the right. The cumulative distribution of fold-change values between the DMSO replicates was used as an estimate of the error distribution for measurements in drug treatment comparisons. That is, the fraction of genes above a given absolute value fold-change level in the comparison of biological replicates should reflect the fraction of genes above that level by chance in any measurement. At a cutoff of log₂ fold-change of +/−1.5, we detect 2.5% (95% CI, 2.1%-2.9% by Agresti-Coull) of genes in the PP242/DMSO comparison and only 0.044% (95% CI, 0.001%-0.172%) of genes in the DMSO replicate comparison. The estimated false discovery rate is therefore q=0.018 in the PP242/DMSO comparison at this fold-change threshold.

[0187] FIG. 10. Transcriptionally regulated mTOR targets. (a and b) qPCR validation of up-regulated or down-regulated transcripts identified by RNA-Seq upon 3-hour PP242 treatment (2.5 μM) in PC3 cells (mean+SEM, n=3). (c) qPCR validation of up-regulated transcript identified by RNA-Seq upon 3-hour rapamycin treatment (50 nM) in PC3 cells (mean+SEM, n=3).

[0188] FIG. 11. mTOR-sensitive translationally regulated gene invasion signature. Mutation of the PRTE abrogates sensitivity to eIF4E. (a) 4 known pro-invasion genes and 7 putative pro-invasion genes discovered through ribosome profiling. (b) Schematic of YB1 5′ UTR cloning (WT, transversion mutant, and deletion mutant of the PRTE (position +20-34, uc001chs.2)) into pGL3-Promoter (left panel). Firefly luciferase activity in PC3-4EBP1^{M} cells after a 24-hour pre-treatment with 1 μg/ml doxycycline followed by transfection of respective 5′ UTR constructs (mean+SEM, n=7, * P<0.0001, t-test) (right panel). n.s.: not statistically significant.

[0189] FIG. 12. ATP site inhibition of mTOR does not reduce transcript levels of the 4 invasion genes. ATP site inhibitor of mTOR time course. (a) mRNA expression of YB1, MTA1, vimentin, and CD44, relative to β-actin upon treatment with rapamycin (50 nM), PP242 (2.5 μM), or an ATP site inhibitor of mTOR (200 nM) for 48 hours in PC3 cells (mean+SEM, n=3). (b) Representative Western blot of 3 independent experiments showing a time course of invasion gene expression before and after treatment with ATP site inhibitor of mTOR (200 nM) in PC3 cells.

[0190] FIG. 13. Polysome analysis after 3-hour ATP site inhibitor of mTOR treatment. (a) Ethidium bromide staining of rRNA species in individual fractions. Fractions 7-13 were determined to be polysome-associated fractions. (b) Overlay of polysome profiles from PC3 cells treated with vehicle (solid line) or ATP site inhibitor of mTOR (100 nM) (dotted line). (c) qPCR analysis of YB1 and rpS19 mRNAs that show differential association in polysome fractions after ATP site inhibitor of mTOR (100 nM) treatment (mean+SEM, n=6). The bottom graph shows that there is no change in β-actin mRNA association in polysome fractions between treatments. P-values (t-test) for each polysome fraction are shown. (d) Representative Western blot of 3 independent experiments showing a time course of eEF2 and rpL28 expression before and after treatment with ATP site inhibitor of mTOR (200 nM) in PC3 cells.

[0191] FIG. 14. 4-gene invasion signature is responsive to ATP site inhibitor of mTOR but not rapamycin in metastatic cell lines. (a-b) Representative Western blot (a) and qPCR analysis (b) of MDA-MB-361 cells after 48-hour treatment with ATP site inhibitor of mTOR (200 nM). (c-d) Representative Western blot (c) and qPCR analysis (d) of SKOV3 cells after 48-hour treatment with ATP site inhibitor of mTOR (200 nM). (e-f) Representative Western blot (e) and qPCR analysis (f) of ACHN cells after 48-hour treatment with ATP site inhibitor of mTOR (200 nM). Westerns=representative Western blot of 2 independent experiments. qPCR−n=3. All data represent mean+SEM.

[0192] FIG. 15. PTEN gene silencing in the A498 PTEN positive renal carcinoma cell line induces the post-transcriptional expression of the 4-gene invasion signature. (a-b) Representative Western blot (a) and qPCR analysis (b) of A498 cells after stable silencing of PTEN and 24 hour treatment with an ATP site inhibitor of mTOR (200 nM). Western=representative Western blot of 2 independent experiments. qPCR−n=3. All data represent mean±SEM.

[0193] FIG. 16. ATP site inhibitor of mTOR inhibits cell migration in PC3 prostate cancer cells as early as 6 hours after drug treatment. (a) Representative wound healing assay of 3 independent experiments in PC3 cells treated with rapamycin (50 nM) or ATP site inhibitor of mTOR (200 nM) for 40 hours. Inset (red box) represents wound at 0 hours. (b) Migration patterns of individual GFP-labeled PC3 cells during hours 3-4 after treatment with rapamycin or ATP site inhibitor of mTOR (34 cells per condition). (c) Average velocity of GFP-labeled PC3 cells during hours 3-4 or 6-7 after treatment with rapamycin (50 nM) or ATP site inhibitor of mTOR (200 nM) (mean+SEM, n=34 cells per condition, * P<0.001, ANOVA).

[0194] FIG. 17. Knockdown of the 4 invasion genes in PC3 prostate cancer cells. YB1, CD44, MTA1, and Vimentin protein levels after 48 hours of gene silencing in PC3 cells.

[0195] FIG. 18. YB1 knockdown and ATP site inhibition of mTOR decreases the protein levels but not mRNA levels of YB1 target genes. (a) Snail1 immunofluorescence in PC3 cells after 48 hours of YB1 gene silencing. Representative Snail1 immunofluorescence (top panels), box plot of Snail1 mean fluorescence intensity per cell (MFI)(n=26 siCtrl cells, n=15 siYB1 cells, * P=0.001, t-test) (bottom panel). (b) Snail1 immunofluorescence in PC3 cells after treatment with rapamycin (50 nM), PP242 (2.5 μM), or ATP site inhibitor of mTOR (200 nM). Representative Snail1 immunofluorescence (left panel), box plot of Snail1 mean fluorescence intensity per cell (MFI) (n=16 vehicle treated cells, n=26 rapamycin treated cells, n=28 PP242 treated cells, n=27 ATP site inhibitor of mTOR treated cells, * P<0.05, ANOVA) (right panel). (c) Representative Western blot (left panel) and quantification of protein levels (right panel) for LEF1 and Twist1 after YB1 gene silencing (mean+SEM, n=6, * P<0.05, t-test). (d) Representative Western blot (left panel) and quantification of protein levels (right panel) for LEF1 and Twist1 after ATP site inhibitor of mTOR treatment (mean+SEM, n=6, * P<0.005, t-test). (e-g) Snail1 (e), LEF1 (f), or Twist1 (g) mRNA expression normalized to β-actin after YB1 gene knockdown or treatment with rapamycin (50 nM), PP242 (2.5 μM) or ATP site inhibitor of mTOR (200 nM) in PC3 cells (mean+SEM, n=3).

[0196] FIG. 19. Effects of invasion gene knockdown or overexpression in PC3 and BPH-1 cells, respectively, on the cell cycle. (a) HA-YB1 and Flag-MTA1 protein levels after 48 hours of overexpression in non-transformed BPH-1 prostate epithelial cells (Y=YB1, M=MTA1). (b) Cell cycle analysis in PC3 cells after knockdown of respective genes (mean+SEM, n=3). (c) Cell cycle analysis upon overexpression of YB1 and/or MTA1 in BPH-1 cells (mean+SEM, n=3).

[0197] FIG. 20. The 4EBP1^{M} does not augment mTORC1 function or global protein synthesis in PC3 cells. (a) Representative Western blot from 3 independent experiments of phospho-p70S6K^{T389} and phospho-rpS6^{S240/244} after a 48-hour treatment with and without 1 μg/ml doxycycline in PC3-4EBP1^{M} cells. (b) Representative [³⁵S]-methionine incorporation from 2 independent experiments in PC3-4EBP1^{M} cells (48 hours, doxycycline 1 μg/mL) (mean+SEM). (c) Representative cap-binding assay from 2 independent experiments after 48-hour treatment with 1 μg/ml doxycycline in PC3-4EBP1^{M} cells. (d) mRNA expression of YB1, MTA1, Vimentin, and CD44 relative to β-actin after 48-hour treatment with 1 μg/ml doxycycline in PC3-4EBP1^{M} cells (mean+SEM, n=3).

[0198] FIG. 21. The 4EBP/eIF4E axis imparts sensitivity to mTOR ATP site inhibition. (a) Quantification of Western blots from 3 independent experiments of PC3 cells after 48 hours of 4EBP1/4EBP2 knockdown followed by 24-hour treatment with an ATP site inhibitor of mTOR (n=3, * p<0.05, ** p<0.01, ANOVA). (b) mRNA expression of YB1, MTA1, vimentin, and CD44 relative to β-actin after 48 hours of gene silencing of 4EBP1 and 4EBP2 followed by a 24-hour treatment with an ATP site inhibitor of mTOR (200 nM) (mean+SEM, n=3). (c) mRNA expression of YB1, MTA1, and CD44 in WT and 4EBP1/4EBP2 DKO MEFs treated with 200 nM ATP site inhibitor of mTOR for 24 hours (mean+SEM, n=3).

[0199] FIG. 22. mTORC2 does not control the expression of the 4-gene invasion signature. (a) mRNA expression of YB1, MTA1, and CD44 relative to β-actin after a 24-hour treatment with ATP site inhibitor of mTOR (200 nM) in mSin1^{-/-} MEFs (mean+SEM, n=3). (b) Representative Western blot analysis from 2 independent experiments of PC3 prostate cancer cells after 48 hours of rictor gene silencing followed by a 24-hour treatment with ATP site inhibitor of mTOR (200 nM). (c) mRNA expression of YB1, MTA1, vimentin, and CD44 relative to β-actin in PC3 prostate cancer cells after 48 hours of rictor gene silencing followed by a 24-hour treatment with ATP site inhibitor of mTOR (200 nM) in PC3 (mean+SEM, n=3). (d) Cell cycle analysis of PC3-4EBP1^{M} cells after treatment with 1 μg/ml doxycycline for 48 hours (mean+SEM, n=3).

[0200] FIG. 23. Complete mTOR inhibition decreases the expression of the 4-gene invasion signature at the level of translational control in vivo in PTEN^{L/L} mice. (a) Validation of antibodies used for immunofluorescence after 48-hour gene silencing of respective genes in PC3 cells. (b) Number of individual CK5⁺ and/or CK8⁺ cells measured in 3 separate mice for mean fluorescence intensity of respective protein targets in WT and PTEN^{L/L} mouse prostates. (c) mRNA expression of YB1, MTA1, vimentin, and CD44 relative to β-actin in WT and PTEN^{L/L} mice after 28 days of treatment with ATP site inhibitor of mTOR (1 mg/kg daily) (mean+SEM, n=3 mice per arm). (d) Representative Western blot of MTA1 from whole prostate tissue in WT and PTEN^{L/L} mice after 28 days of treatment with ATP site inhibitor of mTOR (1 mg/kg daily) (left panel) and quantitation relative to β-actin protein levels (right panel) (mean+SEM, n=3 mice per arm, * P=0.02, ** P=0.04, t-test) (e) Representative Western blot of YB1 from whole prostate tissue in WT and PTEN^{L/L} mice after 28 days of treatment with ATP site inhibitor of mTOR (1 mg/kg daily) (left panel) and quantitation relative to β-actin protein levels (right panel) (mean+SEM, n=4 mice per arm, * P=0.002, ** P=0.04, t-test) (f) Semi-quantitative RT-PCR of vimentin and β-actin for WT and PTEN^{L/L} FACS sorted murine prostate luminal epithelial cells (top panel). RT-PCR of a serial dilution of WT prostate luminal epithelial cell (bottom panel) (g) Z-series of perinuclear vimentin in a PTEN^{L/L} CK8⁺ prostate epithelial cell (red: vimentin; blue: DAPI; 0.4 μm per section; yellow arrows point to perinuclear vimentin).

[0201] FIG. 24. Preclinical efficacy of complete mTOR blockade in vivo. (a) Mouse weights measured every 3 days over the course of the preclinical trial (mean+SEM, n=3 mice per arm). (b) Representative phospho-specific immunohistochemistry of downstream mTOR targets in the ventral prostate (VP) of 9-month-old WT or PTEN^{L/L} mice after 28 days of treatment with ATP site inhibitor of mTOR (1 mg/kg daily) or RAD001 (10 mg/kg daily) (n=6 mice per treatment arm). Scale bar=100 μm. (c) Representative histology of 9-month-old WT or PTEN^{L/L} mice VP after 28 days of treatment with vehicle, RAD001 (10 mg/kg daily), or ATP site inhibitor of mTOR (1 mg/kg daily). Yellow dotted lines encircle prostate glands. Black triangles refer to prostatic secretions. Scale bar=50 μm. (d) Quantification of PIN+ glands in treated mice (mean+SEM, n=6 mice/arm, * P<0.001, ANOVA). (e) Proliferation measured by phospho-histone H3 positive glands in the prostates of 9-month-old WT or PTEN^{L/L} mice treated with RAD001 (10 mg/kg daily) or ATP site inhibitor of mTOR (1 mg/kg daily) (mean+SEM, n=3 mice per arm, * P<0.01, ANOVA). (f) Apoptosis measured by cleaved caspase 3 (CC3) positive cells in the prostates of 9-month-old WT or PTEN^{L/L} mice treated with RAD001 (10 mg/kg daily) or ATP site inhibitor of mTOR (1 mg/kg daily) (mean+SEM, n=3 mice per arm, * P<0.01, ANOVA) (left panel). Representative CC3 images (right panel). Scale bar=25 μm.

[0202] FIG. 25. An ATP site inhibitor of mTOR induces apoptosis in specific cancer cell lines and decreases primary prostate cancer volume in vivo. (a) Apoptosis in LNCaP (n=3) and A498 (n=2) cancer cells after treatment with rapamycin (50 nM), or an ATP site inhibitor of mTOR (200 nM) for 48 hours (mean+SEM, * P<0.001, ** P<0.05, ANOVA, n.s.=not statistically significant). (b) Percentage decrease in ventral and lateral prostate volume in 9-month-old PTEN^{L/L} after a 28-day treatment with vehicle or the ATP site inhibitor of mTOR (1 mg/kg daily) measured by MRI (left panel) (mean+SEM, n=4 mice per arm, * P=0.0008, t-test). Representative MRI images of the PTEN^{L/L} ventral and lateral prostate on day 0 and day 28 of treatment with the ATP site inhibitor of mTOR (right panel) (red dotted lines encircle the ventral and lateral prostate). (c) Additional images of prostate cancer invasion in the PTEN^{L/L} prostate (14-month-old mouse).

[0203] FIG. 26. Two ATP site inhibitors of mTOR mimic effect on translational profiles. These correlation plots provide a representative comparison of change in translational efficiency versus DMSO control by (a) the allosteric mTOR inhibitor rapamycin and the ATP site inhibitor PP242 in PC3 cells, (b) the two ATP site inhibitors INK128 and PP242, and (c) the MEK inhibitor GSK212 and mTOR ATP site inhibitor PP242 in SW620 cells. Each data point represents a single gene. In panels (a) and (b), data points highlighted in red have statistically significant changes in translational efficiency for PP242 versus DMSO control as described herein. In panel (c), the data points highlighted in red correspond to the 144 genes listed in Table 4 below. The allosteric inhibitor, rapamycin, affects the translational efficiency of similar genes affected by PP242, the magnitude of the rapamycin effect is substantially less than with PP242. In contrast, treatment with the two ATP site inhibitors (PP242 and INK128) alters the same gene set and at the same magnitude of change on a gene by gene basis. Finally, the MEK inhibitor GSK212 has little impact on the set of genes with translational efficiencies modulated by PP242.

[0204] FIG. 27. Effect of mTOR and MEK inhibitors on phosphorylation of protein translation components. (a) SW620 cells were treated with DMSO or the MEK inhibitor GSK212 (250 nM) for 8 hrs; (b) PC3 and (c) SW620 cells were treated with DMSO or the mTOR inhibitor PP242 for 3 hrs. Actin was used as a loading control.

[0205] FIG. 28. Induction of procollagen release from fibroblasts by TGF-β. Procollagen Type 1 levels (Procollagen Type 1C-Peptide, “PIPC”) after 24 hrs of treatment of fibroblasts with various concentrations of a PI3K/AKT/mTOR inhibitor (“PAMi”) and 10 ng/mL TGF-β. The difference in absorbance at 450 and 540 nm (y-axis) is proportional to the procollagen concentration.

[0206] FIG. 29. Western blot of protein phosphorylation levels during fibroblast transformation. Western blot analysis of fibroblast transformation as monitored by α-SMA levels after 24 hrs of treatment with various concentrations of a PAMi and 10 ng/mL TGF-β.

[0207] FIG. 30. Translational and transcriptional profile of fibroblasts treated with TGF-β. Comparison of changes in mRNA levels (RNA) and translational rate (RPF) in fibroblasts treated with TGF-β. Data points in red have p≦0.05 for changes in translational efficiency.

[0208] FIG. 31. Hepatic Fibrosis/Hepatic Stellate cell activation from IPA pathway analysis. (a) Early signaling events in hepatic stellate cells. (b) Signaling events in activated hepatic stellate cells. Gene list used and gene signature identified in analysis is based on p-value from differential concentrations of protein-coding mRNAs from control and TGF-β treated fibroblasts. Color coding is based on log₂ fold change.

[0209] FIG. 32. Hepatic Fibrosis/Hepatic Stellate cell activation from IPA pathway analysis. (a) Early signaling events in hepatic stellate cells. (b) Signaling events in activated hepatic stellate cells. Gene list used and gene signature identified in analysis is based on p-value from differential translation rates from control and TGF-β treated fibroblasts. Color coding is based on log₂ fold change.

[0210] FIG. 33. Normalization of translational efficiencies of fibrotic disorder-associated gene signature. The bar graph shows the translational efficiencies of fibrotic disorder-associated gene signature in fibroblasts treated with TGF-β and fibroblasts treated with TGF-β and a PAMi. The normal translational efficiency is set at zero and the p-value upon TGF-β treatment was ≦0.05 for these genes having an altered translational efficiency.

[0211] FIG. 34. Translational profile of genes associated with fibrotic disorder. The bar graph shows the translational efficiencies of all 141 fibrotic disorder-associated genes showing (a) a differential translational profile in transforming fibroblasts (treated with TGF-β) as compared to untreated (normal) fibroblasts, and (b) how treatment of transforming fibroblasts with a PAMi normalizes most genes (when compared to normal fibroblasts, set at zero). The p-value for change in translational efficiency upon TGF-β treatment was ≦0.05 for this gene signature.

[0212] FIG. 35. Translation levels of proteins associated with a neurodevelopmental disease model. Western blot analysis of the protein levels of FMRP, TSC2 and β-actin after siRNA knockdown of the FMRP gene. SH-SY5Y cells were transfected with either siControl or siFMR1 at 100 nM for 3 days.

[0213] FIG. 36. Ribosomal profile of a neurodevelopmental disease model. Comparison of changes in mRNA levels (RNA) and translational rate (RPF) in SH-SY5Y neuronal cells transfected with either a control siRNA or test siFMR1. Data points in red have p≦0.05 for changes in translational efficiency.

[0214] FIG. 37. Top up and down translationally regulated genes in a neurodevelopmental disease model. siRNA knockdown of the FMRP gene in SH-SY5Y cells with siFMR1 versus siCONTROL. The top 20 up- or down-differentially translationally regulated genes show a 60 or 45%, respectively, enrichment for association with neurological disease and development (p-value≦0.05).

[0215] FIG. 38. Effect of PI3K/AKT/mTOR inhibitors on TNF-α production during presence or absence of an induced inflammatory response. RAW264.7 macrophages were pre-treated with PI3K/Atk/mTOR inhibitor PAMi (10 μM) or without PAMi for 2 hrs followed by challenge with or without LPS 1 ng/ml for an additional 1 hr. Culture media was collected and TNF-α levels were quantified.

[0216] FIG. 39. Effect of MEK/ERK and PI3K/AKT/mTOR inhibitors on TNF-α production during an induced inflammatory response. RAW264.7 macrophages were pre-treated with a MEK/ERK pathway inhibitor (“MEi”) (16 nM or 4 nM) or PAMi (2.5 μM) for 2 hrs followed by challenge with LPS 1 ng/ml for an additional 1 hr. Culture media was collected and TNF-α levels quantified.

[0217] FIG. 40. Dose-dependent effect of PI3K/AKT/mTOR inhibitor on protein translation components in the presence or absence of induced inflammatory response. RAW264.7 macrophages were pre-treated with PAMi (10, 2.5, or 0.6 μM) or without PAMi for 2 hrs followed by challenge with or without LPS 1 ng/ml for an additional 1 hr. Culture media was collected and TNF-α levels quantified. Actin was used as a loading control.

[0218] FIG. 41. Effect of MEK inhibitor on various protein translation components during induced inflammatory response. Western blot analysis of RAW264.7 macrophages pre-treated with MEi (250, 62.5, 16, or 4 nM), for 2 hrs followed by challenge with LPS (1 ng/ml) for an additional hour. Actin was used as a loading control.

[0219] FIG. 42. Translational and transcriptional profile of macrophages treated with LPS. Comparison of changes in mRNA levels (RNA) and translational rate (RPF) in macrophages treated with LPS. Data points in red have p≦0.05 for changes in translational efficiency.

[0220] FIG. 43. Translational profile of genes from primary tissue. These correlation plots show the translational efficiencies of genes in a healthy (normal) section of prostate tissue (lower panel) and a section of cancer prostate tissue (upper panel) from the same patient.

[0221] FIG. 44. Translational efficiency of genes from primary tissue. This bar graph shows the number of translationally regulated (up and down) mRNA targets in healthy versus cancer prostate tissue.

### DETAILED DESCRIPTION OF THE INVENTION

### I. Introduction

[0222] The present invention relates to methods of characterizing potential therapeutic agents and validating therapeutic targets using translational profiles from a biological sample. In some embodiments, the methods of the present invention provide a genome-wide characterization of translationally controlled mRNAs downstream of biological pathways (e.g., oncogenic signaling pathways such as the mTOR pathway). The translational profiles that are generated can be used in identifying agents that modulate the biological pathway or in identifying or validating targets for therapeutic intervention.

### II. Definitions

[0223] As used herein, the term “translational profile” refers to the amount of protein that is translated (i.e., translational level) for each gene in a given set of genes in a biological sample, collectively representing a set of individual translational rate values, translational efficiency values, or both translational rate and translational efficiency values for each of one or more genes in a given set of genes. In some embodiments, a translational profile comprises translational levels for a plurality of genes in a biological sample (e.g., in a cell), e.g., for at least about 2, 3, 4, 5, 6, 7, 8, 9, 10, 20, 30, 40, 50, 60, 70, 80, 90, 100, 200, 300, 400, 500, 600, 700, 800, 900, 1000, 2000, 3000, 4000, 5000, 6000, 7000, 8000, 9000, 10,000 genes or more, or for at least about 1%, 2%, 3%, 4%, 5%, 6%, 7%, 8%, 9%, 10%, 15%, 20%, 25% of all genes in the sample or more. In some embodiments, a translational profile comprises a genome-wide measurement of translational levels in a biological sample. In certain embodiments, a translational profile refers to a quantitative measure of the amount of mRNA associated with one or more ribosomes for each gene (i.e., translational rate, efficiency or both) in a given set of genes in a biological sample, wherein the amount of ribosome-associated mRNA correlates to the amount of protein that is translated (i.e., translational level).

[0224] As used herein, “translation rate” or “rate of translation” or “translational rate” refers to the total count of ribosome engagement, association or occupancy of mRNA for a particular gene as compared to the total count of ribosome engagement, association or occupancy of mRNA for at least one other gene or set of genes, wherein the count of total ribosomal occupancy correlates to the level of protein synthesis. Examination of translation rate across individual genes may be quantitative or qualitative, which will reveal differences in translation. In certain embodiments, translational rate provides a measure of protein synthesis for one or more genes, a plurality of genes, or across an entire genome. In particular embodiments, a translation rate is the amount of mRNA fragments protected by ribosomes for a particular gene relative to the amount of mRNA fragments protected by ribosomes for one or more other genes or groups of genes. For example, the mRNA fragments protected by ribosomes may correspond to a portion of the 5′-untranslated region, a portion of the coding region, a portion of a splice variant coding region, or combinations thereof. In further embodiments, the translation rate is a measure of one, a plurality or all mRNA variants of a particular gene. Translation rates can be established for one or more selected genes or groups of genes within a single composition (e.g., biological sample), between different compositions, or between a composition that has been split into at least two portions and each portion exposed to different conditions.

[0225] As used herein, “mRNA level” refers to the amount, abundance, or concentration of mRNA or portions thereof for a particular gene in a composition (e.g., biological sample). In certain embodiments, mRNA level refers to a count of one form, a plurality of forms or all forms of mRNA for a particular gene, including pre-mRNA, mature mRNA, or splice variants thereof. In particular embodiments, an mRNA level for one or more genes or groups of genes corresponds to counts of unique mRNA sequences or portions thereof for a particular gene that map to a 5′-untranslated region, a coding region, a splice variant coding region, or any combination thereof.

[0226] As used herein, “translation efficiency” or “translational efficiency” refers to the ratio of the translation rate for a particular gene to the mRNA level for a particular gene in a given set of genes. For example, gene X may produce an equal abundance of mRNA (i.e., same or similar mRNA level) in normal and diseased tissue, but the amount of protein X produced may be greater in diseased tissue as compared to normal tissue. In this situation, the message for gene X is more efficiently translated in diseased tissue than in normal tissue (i.e., an increased translation rate without an increase in mRNA level). In another example, gene Y may produce half the mRNA level in normal tissue as compared to diseased tissue, and the amount of protein Y produced in normal tissue is half the amount of protein Y produced in diseased tissue. In this second situation, the message for gene Y is translated equally efficiently in normal and diseased tissue (i.e., a change in translation rate in diseased tissue that is proportional to the increase in mRNA level and, therefore, the translational efficiency is unchanged). In other words, the expression of gene X is altered at the translational level, while gene Y is altered at the transcriptional level. In certain situations, both the amount of mRNA and protein may change such that mRNA abundance (transcription), translation rate, translation efficiency, or a combination thereof is altered relative to a particular reference or standard.

[0227] In certain embodiments, translational efficiency may be standardized by measuring a ratio of ribosome-associated mRNA read density (i.e., translation level) to mRNA abundance read density (i.e., transcription level) for a particular gene (see, Example 6 in the Examples section below). As used herein, “read density” is a measure of mRNA abundance and protein synthesis (e.g., ribosome profiling reads) for a particular gene, wherein at least 5, 10, 15, 20, 25, 50, 100, 150, 175, 200, 225, 250, 300 reads or more per unique mRNA or portion thereof is performed in relevant samples to obtain single-gene quantification for one or more treatment conditions. In certain embodiments, translational efficiency is scaled to standardize or normalize the translational efficiency of a median gene to 1.0 after excluding regulated genes (e.g., log₂ fold-change ±1.5 after normalizing for the all-gene median), which corrects for differences in the absolute number of sequencing reads obtained for different libraries. In further embodiments, changes in protein synthesis, mRNA abundance and translational efficiency are similarly computed as the ratio of read densities between different samples and normalized to give a median gene a ratio of 1.0, normalized to the mean, normalized to the mean or median of log values, or the like.

[0228] As used herein, “gene signature” or “gene cluster” refers to a plurality of genes that exhibit a generally coherent, systematic, coordinated, unified, collective, congruent, or signature expression pattern or translation efficiency. In certain embodiments, a gene signature is a plurality of genes that together comprise at least a detectable or identifiable portion of a biological pathway (e.g., 2, 3, 4, 5, or more genes; a cell invasion signature comprising 4 genes is illustrated in FIG. 15), comprise a complete set of genes associated with a biological pathway, or comprise a cluster or grouping of independent genes having a recognized pattern of expression (e.g., response to a known drug or active compound; related to a disease state such as a cancer, an inflammatory disease, an autoimmune disease, a fibrotic disorder, a neurodegenerative disease, a neurodevelopmental disease, a viral infection). One or more genes from a particular gene signature may be part of a different gene signature (e.g., a cell migration pathway may share a gene with a cell adhesion pathway)—that is, gene signatures may intersect or overlap but each signature can still be independently defined by its unique translation profile.

[0229] As used herein, the term “agent” refers to any molecule, either naturally occurring or synthetic, e.g., peptide, protein, oligopeptide (e.g., from about 5 to about 25 amino acids in length, preferably from about 10 to 20 or 12 to 18 amino acids in length, preferably 12, 15, or 18 amino acids in length), small organic molecule (e.g., an organic molecule having a molecular weight of less than about 2500 daltons, e.g., less than 2000, less than 1000, or less than 500 daltons), circular peptide, peptidomimetic, antibody, polysaccharide, lipid, fatty acid, inhibitory RNA (e.g., siRNA or shRNA), polynucleotide, oligonucleotide, aptamer, drug compound, or other compound.

[0230] The terms “polypeptide,” “peptide,” and “protein” are used interchangeably herein to refer to a polymer of amino acid residues. The terms apply to amino acid polymers in which one or more amino acid residue is an artificial chemical mimetic of a corresponding naturally occurring amino acid, as well as to naturally occurring amino acid polymers and non-naturally occurring amino acid polymer.

[0231] The term “amino acid” refers to naturally occurring and synthetic amino acids, as well as amino acid analogs and amino acid mimetics that function in a manner similar to the naturally occurring amino acids. Naturally occurring amino acids are those encoded by the genetic code, as well as those amino acids that are later modified, e.g., hydroxyproline, γ-carboxyglutamate, and O-phosphoserine. Amino acid analogs refers to compounds that have the same basic chemical structure as a naturally occurring amino acid, i.e., an α-carbon that is bound to a hydrogen, a carboxyl group, an amino group, and an R group, e.g., homoserine, norleucine, methionine sulfoxide, methionine methyl sulfonium. Such analogs have modified R groups (e.g., norleucine) or modified peptide backbones, but retain the same basic chemical structure as a naturally occurring amino acid. Amino acid mimetics refers to chemical compounds that have a structure that is different from the general chemical structure of an amino acid, but that functions in a manner similar to a naturally occurring amino acid.

[0232] “Nucleic acid” refers to deoxyribonucleotides or ribonucleotides and polymers thereof in either single- or double-stranded form, and complements thereof. The term encompasses nucleic acids containing known nucleotide analogs or modified backbone residues or linkages, which are synthetic, naturally occurring, and non-naturally occurring, which have similar binding properties as the reference nucleic acid, and which are metabolized in a manner similar to the reference nucleotides. Examples of such analogs include, without limitation, phosphorothioates, phosphoramidates, methyl phosphonates, chiral-methyl phosphonates, 2′-O-methyl ribonucleotides, and peptide-nucleic acids (PNAs).

[0233] Unless otherwise indicated, a particular nucleic acid sequence also implicitly encompasses conservatively modified variants thereof (e.g., degenerate codon substitutions), complementary sequences, splice variants, and nucleic acid sequences encoding truncated forms of proteins, as well as the sequence explicitly indicated. Specifically, degenerate codon substitutions may be achieved by generating sequences in which the third position of one or more selected (or all) codons is substituted with mixed-base and/or deoxyinosine residues (Batzer et al., Nucleic Acid Res., 19:5081 (1991); Ohtsuka et al., J. Biol. Chem., 260:2605-2608 (1985); Rossolini et al., Mol. Cell. Probes, 8:91-98 (1994)). The term nucleic acid is used interchangeably with gene, cDNA, mRNA, shRNA, siRNA, oligonucleotide, and polynucleotide.

[0234] The term “modulate” or “modulator,” as used with reference to modulating an activity of a target gene or signaling pathway, refers to increasing (e.g., activating, facilitating, enhancing, agonizing, sensitizing, potentiating, or upregulating) or decreasing (e.g., preventing, blocking, inactivating, delaying activation, desensitizing, antagonizing, attenuating, or downregulating) the activity of the target gene or signaling pathway. In certain embodiments, a modulator alters a translational profile at the translational level (i.e., increases or decreases translation rate or translation efficiency or both as described herein), at the transcriptional level, or both. In some embodiments, a modulator increases the activity of the target gene or signaling pathway, e.g., by at least about 1-fold, 1.5-fold, 2-fold, 2.5-fold, 3-fold, 3.5-fold, 4-fold, 4.5-fold, 5-fold, 6-fold, 7-fold, 8-fold, 9-fold, 10-fold, 15-fold, 20-fold or more. In some embodiments, a modulator decreases the activity of the target gene or signaling pathway, e.g., by at least about 1-fold, 1.5-fold, 2-fold, 2.5-fold, 3-fold, 3.5-fold, 4-fold, 4.5-fold, 5-fold, 6-fold, 7-fold, 8-fold, 9-fold, 10-fold, 15-fold, 20-fold or more.

[0235] A “biological sample” includes blood and blood fractions or products (e.g., serum, plasma, platelets, red blood cells, and the like); sputum or saliva; kidney, lung, liver, heart, brain, nervous tissue, thyroid, eye, skeletal muscle, cartilage, or bone tissue; cultured cells, e.g., primary cultures, explants, and transformed cells, stem cells, stool, urine, etc. Such biological samples (e.g., disease samples or normal samples) also include sections of tissues such as biopsy and autopsy samples, frozen sections taken for histologic purposes, and cells or other biological material used to model disease or to be representative of a pathogenic state (e.g., TGF-β treated fibroblasts as a model system for fibrosis; LPS treatment of cells as a model system for inflammation, etc.). A biological sample is typically obtained from a “subject,” i.e., a eukaryotic organism, most preferably a mammal such as a primate, e.g., chimpanzee or human; cow; dog; cat; a rodent, e.g., guinea pig, rat, or mouse; rabbit; or a bird; reptile; or fish.

[0236] As used herein, the terms “administer,” “administered,” or “administering” refer to methods of delivering agents or compositions to the desired site of biological action. These methods include, but are not limited to, topical delivery, parenteral delivery, intravenous delivery, transdermal delivery, intradermal delivery, transmucosal delivery, intramuscular delivery, oral delivery, nasal delivery, colonical delivery, rectal delivery, intrathecal delivery, ocular delivery, otic delivery, intestinal delivery, or intraperitoneal delivery. Administration techniques that are optionally employed with the agents and methods described herein, include e.g., as discussed in Goodman and Gilman, The Pharmacological Basis of Therapeutics, current ed.; Pergamon; and Remington's, Pharmaceutical Sciences (current edition), Mack Publishing Co., Easton, Pa.

[0237] As used herein, the term “normalize” or “normalizing” or “normalization” refers to adjusting the translational level (i.e., translational rate and/or translational efficiency) of one or more genes in a biological sample from a subject (e.g., a sample from a subject having a disease or condition) to a level that is more similar, closer to, or comparable to the translational level of those one or more genes in a control sample (e.g., a biological sample from a non-diseased tissue or subject). In certain embodiments, normalization refers to modulation of one or more translational regulators or translational system components to adjust or shift the translational efficiency of one or more genes in a biological sample (e.g., diseased, abnormal or other biologically altered condition) to a translational efficiency that is more similar, closer to or comparable to the translational efficiency of those one or more genes in a non-diseased or normal control sample. In some embodiments, normalization is evaluated by determining translational levels (i.e., translational rate and/or translational efficiency) of one or more genes in a biological sample from a subject (e.g., a sample from a subject having a disease or condition) before and after an agent (e.g., a therapeutic or known active agent) is administered to the subject and comparing the translational levels before and after administration to the translational levels from a control sample in the absence or presence of the agent. Exemplary methods of evaluating normalization of a translational profile associated with a disease or disorder includes identifying an agent, validating a target, or observing a shift in a gene signature. Further exemplary methods of normalization may be used for evaluating therapeutic intervention in a particular condition, disease or disorder.

[0238] As used herein, the term “undruggable target” refers to a gene, or a protein encoded by a gene, for which targeted therapy using a drug compound (e.g., a small molecule or antibody) does not successfully interfere with the biological function of the gene or protein encoded by the gene. Typically, an undruggable target is a protein that lacks a binding site for small molecules or for which binding of small molecules does not alter biological function (e.g., ribosomal proteins); a protein for which, despite having a small molecule binding site, successful targeting of said site has proven intractable in practice (e.g., GTP/GDP proteins); or a protein for which selectivity of small molecule binding has not been obtained due to close homology of the binding site with other proteins, and for which binding of the small molecule to these other proteins obviates the therapeutic benefit that is theoretically achievable with binding to the target protein (e.g., protein phosphatases). A target may be undruggable to antibody-based therapeutics for a variety of reasons, such as intracellular location of the target, masking of target antigenicity (e.g., due to modification with carbohydrate or other masking modifications) or to escape by competition (e.g., by shedding or release of decoy molecules).

[0239] In the present description, any concentration range, percentage range, ratio range, or integer range is to be understood to include the value of any integer within the recited range and, when appropriate, fractions thereof (such as one tenth and one hundredth of an integer), unless otherwise indicated. Also, any number range recited herein relating to any physical feature, such as polymer subunits, size or thickness, are to be understood to include any integer within the recited range, unless otherwise indicated. As used herein, the term “about” means±20% of the indicated range, value, or structure, unless otherwise indicated. It should be understood that the terms “a” and “an” as used herein refer to “one or more” of the enumerated components. The use of the alternative (e.g., “or”) should be understood to mean either one, both, or any combination thereof of the alternatives. As used herein, the terms “include,” “have” and “comprise” are used synonymously, which terms and variants thereof are intended to be construed as non-limiting.

[0240] Additional definitions are set forth throughout this disclosure.

### III. Translational Profiling

[0241] In one aspect, the present invention relates to the generation and analysis of translational profiles. A translational profile provides information about the identity of genes being translated in a biological sample (e.g., a cell) and/or the amount of protein that is translated (i.e., translational level in the form of translational rate, translational efficiency, or both) for each gene in a given set of genes in the biological sample, thereby providing information about the translational landscape in that biological sample. In certain embodiments, a translational profile is a biomarker, or comprises one or more biomarker genes, for a particular sample or condition.

[0242] In certain embodiments, a translational profile comprises one or more biologically meaningful groupings or clusters of genes, referred to as a “gene signature.” For example, a translational profile may comprise a plurality of gene signatures (e.g., 2, 3, 4, 5, 6, 7, 8, 9, 10, or more). In still further embodiments, a translational profile comprises one or more gene signatures in combination with one more additional gene not associated with or part of such gene signatures. In any of the aforementioned embodiments, particular genes, gene signatures, groups of genes, groups of gene signatures or any combination thereof comprise a biomarker. In certain embodiments, a translational profile comprises one or more gene signatures or gene clusters, wherein the one or more gene signatures or gene clusters individually or in a particular combination are a biomarker.

[0243] The expression pattern of one or more genes in one (e.g., a first) translational profile may be altered by an agent, compound, molecule, drug, or the like. In some cases, a test agent, compound, molecule, drug, or the like may mimic the action of an active compound known to have a particular function or induce a particular biological effect or phenotypic change in a cell or a subject. In certain embodiments, a test agent, compound, molecule, drug, or the like is identified as a mimic of a known active compound by causing a shift in the translational profile to be comparable or similar to the translational profile induced by the known active compound. In certain embodiments, a known active compound causes a translational profile to be more comparable or similar to normal. In other embodiments, a known active compound causes a translational profile to be more comparable or similar to a desired phenotype or effect, such as necrosis, apoptosis, or the like.

[0244] In some embodiments, a translational profile comprises translational levels for a plurality of genes in a biological sample, e.g., at least 2, 3, 4, 5, 6, 7, 8, 9, 10, 11, 12, 13, 14, 15, 16, 17, 18, 19, 20, 25, 30, 35, 40, 45, 50, 60, 70, 80, 90, 100, 150, 200, 250, 300, 350, 400, 450, 500, 550, 600, 650, 700, 750, 800, 850, 900, 950, 1000, 1500, 2000, 2500, 3000, 3500, 4000, 4500, 5000, 5500, 6000, 6500, 7000, 7500, 8000, 8500, 9000, 9500, 10,000 genes or more. In some embodiments, a translational profile comprises translational levels for one or more genes of one or more biological pathways in a biological sample (e.g., pathways such as protein synthesis, cell invasion/metastasis, cell division, apoptosis pathway, signal transduction, cellular transport, post-translational protein modification, DNA repair, and DNA methylation pathways). In some embodiments, a translational profile comprises translational levels for a subset of the genome, e.g., for about 1%, 2%, 3%, 4%, 5%, 6%, 7%, 8%, 9%, 10%, 11%, 12%, 13%, 14%, 15%, 16%, 17%, 18%, 19%, 20%, 25%, 30%, 35%, 40%, 45%, 50% of the genome or more. In some embodiments, a translational profile comprises a genome-wide measurement of translational levels.

[0245] A. Biological Samples

[0246] In some embodiments, a biological sample comprises a cell. In some embodiments, the cell is derived from a tissue or organ (e.g., prostate, breast, kidney, lung, liver, heart, brain, nervous tissue, thyroid, eye, skeletal muscle, cartilage, skin, or bone tissue). In some embodiments, the cell is derived from a biological fluid, e.g., blood (e.g., an erythrocyte), lymph (e.g., a monocyte, macrophage, neutrophil, eosinophil, basophil, mast cell, T cell, B cell, and/or NK cell), serum, urine, sweat, tears, or saliva. In some embodiments, the cell is derived from a biopsy (e.g., a skin biopsy, a muscle biopsy, a bone marrow biopsy, a liver biopsy, a gastrointestinal biopsy, a lung biopsy, a nervous system biopsy, or a lymph node biopsy). In some embodiments, the cell is derived from a cultured cell (e.g., a primary cell culture) or a cell line (e.g., PC3, HEK293T, NIH3T3, Jurkat, or Ramos). In some embodiments, the cell is a stem cell or is derived (e.g., differentiated) from a stem cell. In some embodiments, the cell is a cancer stem cell.

[0247] In some embodiments, the biological sample comprises a cancer cell (e.g., a cell obtained or derived from a tumor). In some embodiments, the cancer is prostate cancer, breast cancer, bladder cancer, urogenital cancer, lung cancer, renal cell carcinoma, endometrial cancer, melanoma, ovarian cancer, thyroid cancer, or brain cancer. In some embodiments, the cancer is a metastatic cancer.

[0248] In some embodiments, the biological sample is from a human subject. In some embodiments, the biological sample is from a non-human mammal (e.g., chimpanzee, dog, cat, pig, mouse, rat, sheep, goat, or horse), avian (e.g., pigeon, penguin, eagle, chicken, duck, or goose), reptile (e.g., snake, lizard, alligator, or turtle), amphibian (e.g., frog, toad, salamander, caecilian, or newt), or fish (e.g., shark, salmon, trout, or sturgeon).

[0249] B. Generating Translational Profiles

[0250] Various techniques for quantitating translational levels for a given set of genes and generating a translational profile are known in the art and can be used according to the methods of the present invention. These techniques include, but are not limited to, ribosomal profiling, polysome microarray, immunoassay, and mass spectrometry analysis, each of which is detailed below.

### Ribosomal Profiling

[0251] In some embodiments, one or more translational profiles are generated by ribosomal profiling. Ribosomal profiling provides a quantitative assessment of translational levels in a sample and can be used to measure translational levels on a genome-wide scale. Generally, ribosomal profiling identifies and/or measures the mRNA associated with ribosomes. Ribosome footprinting is used to measure the density of ribosome occupancy on a given mRNA and to identify the position of active ribosomes on mRNA. Using nuclease digestion, the ribosome position and translated message can be determined by analyzing the approximately 30-nucleotide region that is protected by the ribosome. In some embodiments, ribosome-protected mRNA fragments are analyzed and quantitated by a high-throughput sequencing method. For example, in some embodiments the protected fragments are analyzed by microarray. In some embodiments, the protected fragments are analyzed by deep sequencing; see, e.g., Bentley et al., Nature 456:53-59 (2008). Ribosomal profiling is described, for example, in US 2010/0120625; Ingolia et al., Science 324:218-223 (2009); and Ingolia et al., Nat Protoc 7:1534-1550 (2012); each of which is incorporated herein by reference in its entirety.

[0252] Ribosome profiling can comprise methods for detecting a plurality of RNA molecules that are bound by at least one ribosome, wherein the plurality of RNA molecules are associated with ribosomes. In some embodiments, the ribosome profile is of a group of ribosomes, for instance from a polysome. In some embodiments, the ribosome profile is from a group of ribosomes from the same cell or population of cells. For example, in some embodiments, a ribosome profile of a tumor sample can be determined.

[0253] In some embodiments, the ribosomal profiling comprises detecting a plurality of RNA molecules bound to at least one ribosome, by (a) contacting the plurality of RNA molecules with an enzymatic degradant or a chemical degradant, thereby forming a plurality of RNA fragments, wherein each RNA fragment comprises an RNA portion protected from the enzymatic degradant or the chemical degradant by a ribosome to which the RNA portion is bound; (b) amplifying the RNA fragments to form a detectable number of amplified nucleic acid fragments; and (c) detecting the detectable number of amplified nucleic acid fragments, thereby detecting the plurality of RNA molecules bound to at least one ribosome.

[0254] In some embodiments, nucleic acid fragments (e.g., mRNA fragments) are detected and/or analyzed by deep sequencing. Deep sequencing enables the simultaneous sequencing of multiple fragments, e.g., simultaneous sequencing of at least 500, 1000, 1500, 2000 fragments or more. In a typical deep sequencing protocol, nucleic acids (e.g., mRNA fragments) are attached to the surface of a reaction platform (e.g., flow cell, microarray, and the like). The attached DNA molecules may be amplified in situ and used as templates for synthetic sequencing (i.e., sequencing by synthesis) using a detectable label (e.g., a fluorescent reversible terminator deoxyribonucleotide). Representative reversible terminator deoxyribonucleotides may include 3′-O-azidomethyl-2′-deoxynucleoside triphosphates of adenine, cytosine, guanine and thymine, each labeled with a different recognizable and removable fluorophore, optionally attached via a linker. Where fluorescent tags are employed, after each cycle of incorporation, the identity of the inserted bases may be determined by excitation (e.g., laser-induced excitation) of the fluorophores and imaging of the resulting immobilized growing duplex nucleic acid. The fluorophore, and optionally linker, may be removed by methods known in the art, thereby regenerating a 3′ hydroxyl group ready for the next cycle of nucleotide addition. In some embodiments, the ribsome-protected mRNA fragments are detected and/or analyzed by a sequencing method described in US 2010/0120625, incorporated herein by reference in its entirety.

### Polysome Microarray

[0255] In some embodiments, one or more translational profiles are generated by polysome microarray. In a polysome microarray, mRNA is isolated and separated based on the number of associated ribosomes. Fractions of mRNA associated with several ribosomes are pooled to form a translationally active pool and are compared to cytosolic mRNA levels. Polysome microarray methods are described, for example, in Melamed and Arava, Methods in Enzymology, 431:177-201 (2007); and Larsson and Nadon, Biotech and Genet Eng Rev, 25:77-92 (2008); each of which is incorporated herein by reference in its entirety.

[0256] In some embodiments, polysome fractions having mRNA associated with multiple ribosomes (e.g., 3, 4, 5, 10 or more ribosomes) are pooled from a biological sample and RNA is isolated and labeled. The RNA samples from the translationally active pool are hybridized to a microarray with a control RNA sample (e.g., an unfractionated RNA sample). Ratios of polysome-to-free RNA are generated for each gene in the microarray to determine the relative levels of ribosomal association for each of the genes.

### Immunoassay

[0257] In some embodiments, one or more translational profiles are generated by immunoassay. Immunoassay techniques and protocols are generally described in Price and Newman, “Principles and Practice of Immunoassay,” 2nd Edition, Grove's Dictionaries, 1997; and Gosling, “Immunoassays: A Practical Approach,” Oxford University Press, 2000. A variety of immunoassay techniques, including competitive and non-competitive immunoassays, can be used. See, e.g., Self et al., Curr. Opin. Biotechnol., 7:60-65 (1996). The term immunoassay encompasses techniques including, without limitation, enzyme immunoassays (EIA) such as enzyme multiplied immunoassay technique (EMIT), enzyme-linked immunosorbent assay (ELISA), IgM antibody capture ELISA (MAC ELISA), and microparticle enzyme immunoassay (MEIA); capillary electrophoresis immunoassays (CEIA); radioimmunoassays (RIA); immunoradiometric assays (IRMA); fluorescence polarization immunoassays (FPIA); and chemiluminescence assays (CL). If desired, such immunoassays can be automated. Immunoassays can also be used in conjunction with laser induced fluorescence. See, e.g., Schmalzing et al., Electrophoresis, 18:2184-93 (1997); Bao, J. Chromatogr. B. Biomed. Sci., 699:463-80 (1997).

[0258] A detectable moiety can be used in the assays described herein. A wide variety of detectable moieties can be used, with the choice of label depending on the sensitivity required, ease of conjugation with the antibody, stability requirements, and available instrumentation and disposal provisions. Suitable detectable moieties include, but are not limited to, radionuclides, fluorescent dyes (e.g., fluorescein, fluorescein isothiocyanate (FITC), Oregon Green™, rhodamine, Texas red, tetrarhodimine isothiocynate (TRITC), Cy3, Cy5, etc.), fluorescent markers (e.g., green fluorescent protein (GFP), phycoerythrin, etc.), autoquenched fluorescent compounds that are activated by tumor-associated proteases, enzymes (e.g., luciferase, horseradish peroxidase, alkaline phosphatase, etc.), nanoparticles, biotin, digoxigenin, and the like.

[0259] Useful physical formats comprise surfaces having a plurality of discrete, addressable locations for the detection of a plurality of different sequences. Such formats include microarrays and certain capillary devices. See, e.g., Ng et al., J. Cell Mol. Med., 6:329-340 (2002); U.S. Pat. No. 6,019,944. In these embodiments, each discrete surface location may comprise antibodies to immobilize one or more sequences for detection at each location. Surfaces may alternatively comprise one or more discrete particles (e.g., microparticles or nanoparticles) immobilized at discrete locations of a surface, where the microparticles comprise antibodies to immobilize one or more sequences for detection. Other useful physical formats include sticks, wells, sponges, and the like.

[0260] Analysis can be carried out in a variety of physical formats. For example, the use of microtiter plates or automation could be used to facilitate the processing of large numbers of samples (e.g., for determining the translational levels of 100, 500, 1000, 5000, 10,000 genes or more).

### Mass Spectrometry Analysis

[0261] In some embodiments, one or more translational profiles are generated by mass spectrometry analysis. Mass spectrometry (“MS”) generally involves the ionization of the analyte (e.g., a translated protein or portion thereof) to generate a charged analyte and measuring the mass-to-charge ratios of said analyte. During the procedure the sample containing the analyte is loaded onto a MS instrument and undergoes vaporization. The components of the sample are then ionized by one of a variety of methods.

[0262] As a non-limiting example, during Electrospray-MS (ESI) the analyte is initially dissolved in liquid aerosol droplets. Under the influence of high electromagnetic fields and elevated temperature and/or application of a drying gas the droplets get charged and the liquid matrix evaporates. After all liquid matrix is evaporated the charges remain localized at the analyte molecules that are transferred into the Mass Spectrometer. In matrix assisted laser desorption ionization (MALDI) a mixture of analyte and matrix is irradiated by a laser beam. This results in localized ionization of the matrix material and desorption of analyte and matrix. The ionization of the analyte is believed to happen by charge transfer from the matrix material in the gas phase. For a detailed description of ESI and MALDI, see, e.g., Mano N et al. Anal. Sciences 19 (1) (2003) 3-14. For a description of desorption electrospray ionization (DESI), see Takats Z et al. Science 306 (5695) (2004) 471-473. See also Karas, M.; Hillencamp, F. Anal. Chem. 60:2301 1988); Beavis, R. C. Org. Mass Spec. 27:653 (1992); and Creel, H. S. Trends Poly. Sci. 1(11):336 (1993).

[0263] Ionized sample components are then separated according to their mass-to-charge ratio in a mass analyzer. Examples of different mass analyzers used in LC/MS include, but are not limited to, single quadrupole, triple quadrupole, ion trap, TOF (time of Flight) and quadrupole-time of flight (Q-TOF).

[0264] The use of MS for analyzing proteins is also described, for example, in Mann et al., Annu. Rev. Biochem. 70:437-73 (2001).

[0265] C. Differential Translational Profiling

[0266] The expression pattern of one or more genes, gene signatures or combinations thereof from a (e.g., first) translational profile may differ from the expression pattern observed in one or more genes, gene signatures or combinations thereof from one or more different (e.g., second, third, etc.) translational profiles. In such situations, the one or more genes, gene signatures or combinations thereof showing different expression patterns between profiles are considered to be differentially translated. As used herein, the phrase “differentially translated” refers to the change or difference (e.g., increase, decrease or a combination thereof) in translation rate, translation efficiency, or both of one gene, a plurality of genes, a set of genes of interest (referred to as “gene markers” or “gene marker set”), one or more gene clusters, or one or more gene signatures under a particular condition as compared to the translation rate, translation efficiency, or both of the same gene, plurality of genes, set of gene markers, gene clusters, or gene signatures under a different condition, which is observed as a difference in expression pattern. For example, a translational profile of a diseased cell may reveal that one or more genes have higher translation rates and/or efficiencies (e.g., higher ribosome engagement of mRNA or higher protein abundance) than observed in a normal cell. In some embodiments, one or more gene signatures, gene clusters or sets of gene markers are differentially translated in a first translational profile as compared to one or more other translational profiles. In further embodiments, one or more genes, gene signatures, gene clusters or sets of gene markers in a first translational profile show at least a two-fold translation differential or at least a 1.1 log₂ change (i.e., increase or decrease) as compared to the same one or more genes in at least one other different (e.g., second, third, etc.) translational profile.

[0267] In some embodiments, two or more translational profiles are generated and compared to each other to determine the differences (i.e., increases and/or decreases in translational levels, such as translational rate and/or translational efficiency) for each gene in a given set of genes between the two or more translational profiles. The comparison between the two or more translational profiles is referred to as the “differential translational profile.” In certain embodiments, a differential translational profile comprises one or more genes, gene signatures (e.g., a biological or disease-associated pathway), or combinations thereof. In certain other embodiments, a differential translational profile comprises one or more clusters or groupings of independent genes having a recognized pattern of expression, such as an oncogenic signaling pathway, inflammatory disease-associated pathway, autoimmune disease-associated pathway, neurodegenerative disease-associated pathway, neurocognitive function disorder-associated pathway, fibrotic disorder-associated pathway, metabolic disease-associated pattern, or the like.

[0268] In some embodiments, methods are provided for identifying a gene signature associated with a disease. In some embodiments, the method comprises:
[0269] (a) determining a first translational profile for a plurality of genes from a disease sample;
[0270] (b) determining a second translational profile for a plurality of genes from a control non-diseased (e.g., normal) sample;
[0271] (c) identifying a differential translational profile between the first and second translational profiles; and
[0272] (d) identifying one or more gene signatures associated with a disease when the disease sample contacted with a known therapeutic has a translational profile for certain genes of a gene cluster or one or more biological pathways found in the differential translational profile that are closer to the translational profile of the same genes in the second translational profile.

[0273] The translational profiles that are generated for identifying a gene signature associated with a disease can be generated according to any of the methods described herein. In some embodiments, translational profiles are generated by ribosomal profiling, polysome microarray, immunoassay, or combinations thereof. In certain embodiments, translational profiles are generated by ribosomal profiling. In some embodiments, the disease sample is from a subject having or suspected of having a cancer, an inflammatory disease, an autoimmune disease, a fibrotic disorder, a neurodegenerative disease, a neurodevelopmental disease, a metabolic disease, a viral infection, or cardiomyopathy.

[0274] In some embodiments, a differential translational profile compares a first translational profile comprising gene translational levels for an experimental biological sample or subject, wherein the experimental biological sample or subject has been contacted with an agent as described herein (e.g., a peptide, protein, RNA, drug molecule, or small organic molecule) with a second translational profile comprising gene translational levels for a control biological sample or subject, e.g., a corresponding biological sample or subject of the same type that has not been contacted with the agent.

[0275] In some embodiments, a differential translational profile compares a first translational profile comprising gene translational levels for an experimental biological sample, wherein the experimental biological sample is from a subject having an unknown disease state (e.g., a cancer) or an unknown responsiveness to a therapeutic agent, with a second translational profile comprising gene translational levels for a control biological sample, e.g., a biological sample from a subject known to be positive for a disease state (e.g., a cancer) or from a subject that is a known responder to the therapeutic agent or from a non-diseased subject or tissue.

[0276] In some embodiments, differential profiles are generated for each of the first and second translational profiles, e.g., to compare the differences in translational levels for one or more genes in the presence or absence of a condition, or before and after administration of an agent, for the first translational profile (e.g., a translational profile from an experimental subject or sample) as compared to the second translational profile (e.g., a translational profile from a control subject or sample). For example, in some embodiments, differential profiles are generated for an experimental subject or sample (e.g., a subject having a cancer) before and after administration of a therapeutic agent and for a control subject or sample (e.g., a subject that is a known responder to the therapeutic agent, or a non-diseased (normal) subject or sample) before and after administration of the therapeutic agent. The first differential profile for the first translational profile (from the experimental subject or sample) is compared to the second differential profile for the second translational profile (from the control subject or sample) to determine the similarities in translational levels of one or more genes for the first differential profile as compared to the second differential profile. Based on the similarities between the differential profiles (e.g., whether the differential profiles are highly similar or comparable, or whether the translational level for one or more genes in the first differential profile is about the same as the translational level for the one or more genes in the second differential profile), it can be determined whether or not the experimental subject or control is likely to respond to the therapeutic agent.

[0277] In certain embodiments, differential translation between genes or translational profiles may involve or result in a biological (e.g., phenotypic, physiological, clinical, therapeutic, prophylactic) benefit. For example, when identifying a therapeutic, validating a target, or treating a subject, a “biological benefit” means that the effect on translation rate and/or translation efficiency or on the translation rate and/or translation efficiency of one or more genes of a translational profile allows for intervention or management of a disease, disorder, or condition of a subject (e.g., a human or non-human mammal, such as a primate, horse, dog, mouse, rat). In general, one or more differential translations or differential translation profiles indicate that a “biological benefit” will be in the form, for example, of an improved clinical outcome; lessening or alleviation of symptoms associated with disease; decreased occurrence of symptoms; improved quality of life; longer disease-free status; diminishment of extent of disease; stabilization of a disease state; delay of disease progression; remission; survival; or prolonging survival. In certain embodiments, a biological benefit comprises normalization of a differential translation profile, or comprises a shift in translational profile to one closer to or comparable to a translational profile induced by a known active compound or therapeutic, or comprises inducing, stimulating or promoting a desired phenotype or outcome (e.g., apoptosis, necrosis, cytotoxicity), or reducing, inhibiting or preventing an undesired phenotype or outcome (e.g., proliferation, migration).

### IV. Methods of Identifying Agents that Modulate Translation

[0278] In one aspect, the present invention relates to methods of identifying an agent that modulates translation in a biological pathway (e.g., an oncogenic signaling pathway) in a biological sample. In some embodiments, the present invention relates to methods of identifying an agent that inhibits, antagonizes, or downregulates translation in a biological pathway (e.g., an oncogenic signaling pathway) or disease. In some embodiments, the present invention relates to methods of identifying an agent that modulates, i.e., potentiates, agonizes, inhibits, or upregulates, translation in a biological pathway (e.g., an oncogenic signaling pathway) or disease.

[0279] A. Translational Profiles for Identifying Agents that Modulate Translation

[0280] In some embodiments, a method for identifying an agent that modulates translation in a disease comprises:
[0281] (a) determining a first translational profile for a plurality of genes from a disease sample contacted with a candidate agent;
[0282] (b) determining a second translational profile for a plurality of genes from a control disease sample not contacted with the agent; and
[0283] (c) identifying the agent as a modulator of translation in a disease when one or more genes, one or more gene signatures or combinations thereof are differentially translated in the first translational profile as compared to the second translational profile and when the differential translation results in a biological benefit.

[0284] The translational profiles that are generated for identifying an agent that modulates translation in a disease can be generated according to any of the methods described herein. In some embodiments, translational profiles are generated by ribosomal profiling, polysome microarray, immunoassay, or combinations thereof. In certain embodiments, translational profiles are generated by ribosomal profiling.

[0285] In some embodiments, translational profiles comprise translational efficiencies, translational rates, or a combination thereof for at least 2, 3, 4, 5, 6, 7, 8, 9, 10, 11, 12, 13, 14, 15, 16, 17, 18, 19, 20, 25, 30, 35, 40, 45, 50, 60, 70, 80, 90, 100, 150, 200, 250, 300, 350, 400, 450, 500, 550, 600, 650, 700, 750, 800, 850, 900, 950, 1000, 1500, 2000, 2500, 3000, 3500, 4000, 4500, 5000, 5500, 6000, 6500, 7000, 7500, 8000, 8500, 9000, 9500, 10,000 genes or more in the biological sample. In some embodiments, a first or second translational profile or both comprise translational efficiencies, translational rates, or combinations thereof for at least about 1%, 2%, 3%, 4%, 5%, 6%, 7%, 8%, 9%, 10%, 11%, 12%, 13%, 14%, 15%, 16%, 17%, 18%, 19%, 20%, 25%, 30%, 35%, 40%, 45%, 50% or more of all genes in a biological sample. In some embodiments, translational profiles comprise genome-wide measurements of gene translational levels.

[0286] In some embodiments, an agent that modulates translation in a disease is identified as suitable for use when one or more genes of one or more biological pathways, gene signatures or combinations thereof are differentially translated by at least 1.5-fold or at least 2-fold (e.g., at least 1.5-fold, at least 2-fold, at least 2.5-fold, at least 3-fold, at least 3.5-fold, at least 4-fold, at least 4.5-fold, at least 5-fold, at least 6-fold, at least 7-fold, at least 8-fold, at least 9-fold, at least 10-fold or more) in the first translational profile (e.g., treated disease sample) as compared to the second translational profile (e.g., untreated disease sample). In some embodiments, an agent that modulates translation in a disease is identified as suitable for use when the translational rate, translational efficiency or both for one or more genes of one or more biological pathways, gene signatures or combinations thereof are decreased by at least 1.5-fold or at least 2-fold (e.g., at least 1.5-fold, at least 2-fold, at least 2.5-fold, at least 3-fold, at least 3.5-fold, at least 4-fold, at least 4.5-fold, at least 5-fold, at least 6-fold, at least 7-fold, at least 8-fold, at least 9-fold, at least 10-fold or more) in the first translational profile as compared to the second translational profile. In some embodiments, an agent that modulates translation in a disease is identified as suitable for use when the translational rate, translational efficiency or both for one or more genes of one or more biological pathways, gene signatures or combinations thereof are increased by at least 1.5-fold or at least 2-fold (e.g., at least 1.5-fold, at least 2-fold, at least 2.5-fold, at least 3-fold, at least 3.5-fold, at least 4-fold, at least 4.5-fold, at least 5-fold, at least 6-fold, at least 7-fold, at least 8-fold, at least 9-fold, at least 10-fold or more) in the first translational profile as to the second translational profile.

[0287] In some embodiments, less than about 20% of the genes in the genome are differentially translated by at least 1.5-fold or at least 2-fold in the first translational profile as compared to the second translational profile. In some embodiments, less than about 5% of the genes in the genome are differentially translated by at least 1.5-fold or at least 2-fold in the first translational profile as compared to the second translational profile. In some embodiments, less than about 1% of the genes in the genome are differentially translated by at least 1.5-fold, at least 2-fold, at least 3-fold, at least 4-fold, or at least 5-fold in the first translational profile as compared to the second translational profile. In some embodiments, less than 1% of the genes in the genome are differentially translated by at least 3-fold in the first translational profile as compared to the second translational profile. In some embodiments, less than 1% of the genes in the genome are differentially translated by at least 5-fold in the first translational profile as compared to the second translational profile.

[0288] In some embodiments, the differentially translated genes comprise one or more biological pathways, such as at least two or at least three biological pathways. In certain embodiments, the one or more differentially translated genes comprise a plurality of genes and optionally the plurality of differentially translated genes may comprise one or more gene signatures. In further embodiments, the one or more genes are differentially translated at least a two-fold or more. In still further embodiments, each translational profile comprises at least 100 genes, at least 200 genes, at least 300 genes, at least 400 genes, at least 500 genes, or each translational profile comprises a genome-wide translational profile. For example, less than about 25%, about 20%, about 15%, about 10%, about 5%, about 4%, about 3%, about 2% or about 1% of the genes in the genome are differentially translated in a translational profile from a disease sample treated with a candidate agent as compared to a translational profile of an untreated disease sample.

[0289] A disease sample may be obtained from any subject having a disease of interest to identify agents that affect translational profiles in such samples. In certain embodiments, the subject has or is suspected of having a disease, such as a cancer, an inflammatory disease, an autoimmune disease, a fibrotic disorder, a neurodegenerative disease, a neurodevelopmental disease, a metabolic disease, a viral infection, or cardiomyopathy.

[0290] B. Translational Profiles for Identifying Agents that Modulate an Oncogenic Signaling Pathway

[0291] In some embodiments, the method of identifying an agent that modulates an oncogenic signaling pathway comprises:
[0292] (a) contacting the biological sample with an agent;
[0293] (b) determining a first translational profile for the contacted biological sample, wherein the translational profile comprises translational levels for one or more genes having a 5′ terminal oligopyrimidine tract (5′ TOP) and/or a pyrimidine-rich translational element (PRTE); and
[0294] (c) comparing the first translational profile to a second translational profile comprising translational levels for the one or more genes in a control sample that has not been contacted with the agent;
[0295] wherein a difference in the translational levels of the one or more genes in the first translation profile as compared to the second translation profile identifies the agent as a modulator of the oncogenic signaling pathway.

[0296] In some embodiments, a gene that has a different translational level in the first translational profile as compared to the second translational profile is a gene having a 5′ terminal oligopyrimidine tract (5′ TOP) sequence. A 5′ TOP sequence is a sequence that occurs in the 5′ untranslated region (5′ UTR) of mRNA. This element is comprised of a cytidine residue at the cap site followed by an uninterrupted stretch of up to 13 pyrimidines. Non-limiting examples of genes having a 5′ TOP sequence are shown in Table 1 below. In some embodiments, translational levels are compared for the first translational profile and the second translational profile for 1, 2, 3, 4, 5, 6, 7, 8, 9, 10, 11, 12, 13, 14, 15, 16, 17, 18, 19, 20 or more genes selected from the genes listed in Table 1.

TABLE 1
Translationally regulated mTOR-responsive genes having a 5′ TOP sequence

| Gene | Description | SEQ ID NO |
|---|---|---|
| AP2A1 | adaptor-related protein complex 2, alpha 1 subunit | 92 |
| CCNI | cyclin I | 96 |
| CD44 | CD44 antigen | 123 |
| CHP | calcineurin-like EF hand protein 1 | 116 |
| CRTAP | cartilage associated protein | 31 |
| EEF1A2 | eukaryotic translation elongation factor 1, alpha 2 | 45 |
| EEF1B2 | eukaryotic translation elongation factor 1, beta 2 | 129 |
| EEF1G | eukaryotic translation elongation factor 1, gamma | 34 |
| EEF2 | eukaryotic translation elongation factor 2 | 1 |
| EIF4B | eukaryotic translation initiation factor 4B | 37 |
| GAPDH | glyceraldehyde-3-phosphate dehydrogenase | 58 |
| GNB2L1 | guanine nucleotide binding protein (G protein), beta | 22 |
| | polypeptide 2-like 1 | |
| HNRNPA1 | heterogeneous nuclear ribonucleoprotein A1 | 56 |
| HSPA8 | heat shock 70 kDa protein 8 | 42 |
| IPO7 | importin 7 | 109 |
| LCMT1 | leucine carboxyl methyltransferase 1 | 107 |
| NAP1L1 | nucleosome assembly protein 1-like 1 | 93 |
| PABPC1 | poly(A) binding protein, cytoplasmic 1 | 17 |
| PACS1 | phosphofurin acidic cluster sorting protein 1 | 117 |
| PGM1 | phosphoglucomutase 1 | 121 |
| RABGGTB | Rab geranylgeranyltransferase, beta subunit | 139 |
| RPL10 | ribosomal protein L10 | 13 |
| RPL12 | ribosomal protein L12 | 3 |
| RPL13 | ribosomal protein L13 | 70 |
| RPL14 | ribosomal protein L14 | 53 |
| RPL15 | ribosomal protein L15 | 126 |
| RPL17 | ribosomal protein L17 | 79 |
| RPL22 | ribosomal protein L22 | 91 |
| RPL22L1 | ribosomal protein L22 L1 | 35 |
| RPL23 | ribosomal protein L23 | 74 |
| RPL29 | ribosomal protein L29 | 60 |
| RPL31 | ribosomal protein L31 isoform 2 | 49 |
| RPL32 | ribosomal protein L32 | 33 |
| RPL34 | ribosomal protein L34 | 11 |
| RPL36 | ribosomal protein L36 | 63 |
| RPL36A | ribosomal protein L36A | 66 |
| RPL37 | ribosomal protein L37 | 54 |
| RPL37A | ribosomal protein L37A | 18 |
| RPL39 | ribosomal protein L39 | 43 |
| RPL4 | ribosomal protein L4 | 104 |
| RPL41 | ribosomal protein L41 | 113 |
| RPL5 | ribosomal protein L5 | 86 |
| RPL6 | ribosomal protein L6 | 89 |
| RPL8 | ribosomal protein L8 | 59 |
| RPLP0 | ribosomal protein, large, P0 | 28 |
| RPLP2 | ribosomal protein, large, P2 | 38 |
| RPS10 | ribosomal protein S10 | 77 |
| RPS11 | ribosomal protein S11 | 51 |
| RPS14 | ribosomal protein S14 | 94 |
| RPS15A | ribosomal protein S15A | 21 |
| RPS2 | ribosomal protein S2 | 4 |
| RPS20 | ribosomal protein S20 | 24 |
| RPS3A | ribosomal protein S3A | 61 |
| RPS5 | ribosomal protein S5 | 19 |
| RPS6 | ribosomal protein S6 | 101 |
| RPS9 | ribosomal protein S9 | 29 |
| SECTM1 | secreted and transmembrane 1 | 112 |
| TPT1 | tumor protein, translationally-controlled 1 | 65 |
| UBA52 | ubiquitin A-52 residue ribosomal protein fusion product 1 | 84 |
| VIM | vimentin | 40 |
| ABCB7 | ATP-binding cassette, sub-family B (MDR/TAP), member 7 | 134 |
| ALKBH7 | alkB, alkylation repair homolog 7 | 85 |
| ATP5G2 | ATP synthase, H+ transporting, mitochondrial Fo | 144 |
| | complex, subunit C2 (subunit 9) | |
| EEF1A1 | eukaryotic translation elongation factor 1 alpha 1 | 7 |
| EIF2S3 | eukaryotic translation initiation factor 2, subunit 3 gamma, | 80 |
| | 52 kDa | |
| EIF3H | eukaryotic translation initiation factor 3, subunit H | 98 |
| EIF3L | eukaryotic translation initiation factor 3, subunit L | 108 |
| GLTSCR2 | glioma tumor suppressor candidate region gene 2 | 15 |
| IMPDH2 | IMP (inosine 5′-monophosphate) dehydrogenase 2 | 142 |
| PFDN5 | prefoldin subunit 5 | 130 |
| RPL10A | ribosomal protein L10a | 46 |
| RPL11 | ribosomal protein L11 | 23 |
| RPL13A | ribosomal protein L13a | 5 |
| RPL18 | ribosomal protein L18 | 62 |
| RPL19 | ribosomal protein L19 | 103 |
| RPL21 | ribosomal protein L21 | 20 |
| RPL24 | ribosomal protein L24 | 124 |
| RPL26 | ribosomal protein L26 | 52 |
| RPL27A | ribosomal protein L27A | 12 |
| RPL28 | ribosomal protein L28 | 8 |
| RPL3 | ribosomal protein L3 | 16 |
| RPL30 | ribosomal protein L30 | 81 |
| RPL7A | ribosomal protein L7a | 25 |
| RPLP1 | ribosomal protein, large, P1 | 50 |
| RPS12 | ribosomal protein S12 | 2 |
| RPS13 | ribosomal protein S13 | 105 |
| RPS16 | ribosomal protein S16 | 39 |
| RPS19 | ribosomal protein S19 | 26 |
| RPS21 | ribosomal protein S21 | 27 |
| RPS23 | ribosomal protein S23 | 100 |
| RPS24 | ribosomal protein S24 | 90 |
| RPS25 | ribosomal protein S25 | 75 |
| RPS27 | ribosomal protein S27 | 10 |
| RPS28 | ribosomal protein S28 | 9 |
| RPS29 | ribosomal protein S29 | 73 |
| RPS3 | ribosomal protein S3A | 61 |
| RPS7 | ribosomal protein S7 | 102 |

[0297] In some embodiments, a gene that has a different translational level in the first translational profile as compared to the second translational profile is a gene having a pyrimidine-rich translational element (PRTE). This element consists of an invariant uridine at its position 6 and does not reside at position +1 of the 5′ UTR. See, e.g., FIG. 7(c). Non-limiting examples of genes having a PRTE sequence are shown in Table 2 below. In some embodiments, translational levels are compared for the first translational profile and the second translational profile for 1, 2, 3, 4, 5, 6, 7, 8, 9, 10, 11, 12, 13, 14, 15, 16, 17, 18, 19, 20 or more genes selected from the genes listed in Table 2.

TABLE 2
Translationally regulated mTOR-responsive
genes having a PRTE sequence

| | | SEQ |
|---|---|---|
| Gene | Description | ID NO |
| EEF2 | eukaryotic translation elongation factor 2 | 1 |
| RPL12 | ribosomal protein L12 | 3 |
| RPS2 | ribosomal protein S2 | 4 |
| RPL18A | ribosomal protein L18a | 6 |
| RPL34 | ribosomal protein L34 | 11 |
| RPL10 | ribosomal protein L10 | 13 |
| EEF1D | eukaryotic translation elongation factor 1 delta | 14 |
| PABPC1 | poly(A) binding protein, cytoplasmic 1 | 17 |
| RPL37A | ribosomal protein L37a | 18 |
| RPS5 | ribosomal protein S5 | 19 |
| RPS15A | ribosomal protein S15a | 21 |
| GNB2L1 | guanine nucleotide binding protein (G protein) | 22 |
| RPS20 | ribosomal protein S20 isoform 1 | 24 |
| RPLP0 | ribosomal protein P0 | 28 |
| RPS9 | ribosomal protein S9 | 29 |
| CRTAP | cartilage associated protein | 31 |
| RPL32 | ribosomal protein L32 | 33 |
| EEF1G | eukaryotic translation elongation factor 1, gamma | 34 |
| RPL22L1 | ribosomal protein L22-like 1 | 35 |
| YB1 | Y-box binding protein 1 | 36 |
| EIF4B | eukaryotic translation initiation factor 4B | 37 |
| RPLP2 | ribosomal protein P2 | 38 |
| VIM | vimentin | 40 |
| HSPA8 | heat shock 70 kDa protein 8 isoform 1 | 42 |
| RPL39 | ribosomal protein L39 | 43 |
| AHCY | adenosylhomocysteinase isoform 1 | 44 |
| EEF1A2 | eukaryotic translation elongation factor 1 alpha 2 | 45 |
| PABPC4 | poly A binding protein, cytoplasmic 4 isoform 1 | 47 |
| RPS4X | ribosomal protein S4, X-linked X isoform | 48 |
| RPL31 | ribosomal protein L31 isoform 2 | 49 |
| RPS11 | ribosomal protein S11 | 51 |
| RPL14 | ribosomal protein L14 | 53 |
| RPL37 | ribosomal protein L37 | 54 |
| RPL7 | ribosomal protein L7 | 55 |
| HNRNPA1 | heterogeneous nuclear ribonucleoprotein A1 | 56 |
| RPS8 | ribosomal protein S8 | 57 |
| GAPDH | glyceraldehyde-3-phosphate dehydrogenase | 58 |
| RPL8 | ribosomal protein L8 | 59 |
| RPL29 | ribosomal protein L29 | 60 |
| RPS3A | ribosomal protein S3a | 61 |
| RPL36 | ribosomal protein L36 | 63 |
| TPT1 | tumor protein, translationally-controlled 1 | 65 |
| RPL36A | ribosomal protein L36a | 66 |
| TKT | transketolase isoform 1 | 68 |
| LMF2 | lipase maturation factor 2 | 69 |
| RPL13 | ribosomal protein L13 | 70 |
| RPL23 | ribosomal protein L23 | 74 |
| TUBB3 | tubulin, beta, 4 | 76 |
| RPS10 | ribosomal protein S10 | 77 |
| FASN | fatty acid synthase | 78 |
| RPL17 | ribosomal protein L17 | 79 |
| ACTG1 | actin, gamma 1 propeptide | 82 |
| COL6A2 | alpha 2 type VI collagen isoform 2C2 | 83 |
| UBA52 | ubiquitin and ribosomal protein L40 precursor | 84 |
| RPL5 | ribosomal protein L5 | 86 |
| PGLS | 6-phosphogluconolactonase | 87 |
| RPL6 | ribosomal protein L6 | 89 |
| RPL22 | ribosomal protein L22 | 91 |
| AP2A1 | adaptor-related protein complex 2, alpha 1 | 92 |
| NAP1L1 | nucleosome assembly protein 1-like 1 | 93 |
| RPS14 | ribosomal protein S14 | 94 |
| CCNI | cyclin I | 96 |
| MTA1 | metastasis associated 1 | 97 |
| RPL9 | ribosomal protein L9 | 99 |
| RPL4 | ribosomal protein L4 | 104 |
| LCMT1 | leucine carboxyl methyltransferase 1 isoform a | 107 |
| IPO7 | importin 7 | 109 |
| PC | pyruvate carboxylase | 110 |
| RPS27A | ubiquitin and ribosomal protein S27a | 111 |
| SECTM1 | secreted and transmembrane 1 precursor | 112 |
| RPL41 | ribosomal protein L41 | 113 |
| TSC2 | tuberous sclerosis 2 isoform 1 | 114 |
| COL18A1 | alpha 1 type XVIII collagen isoform 3 | 115 |
| CHP | calcium binding protein P22 | 116 |
| PACS1 | phosphofurin acidic cluster sorting protein 1 | 117 |
| BRF1 | transcription initiation factor IIIB | 118 |
| PTGES2 | prostaglandin E synthase 2 | 119 |
| PGM1 | phosphoglucomutase 1 | 121 |
| SLC19A1 | solute carrier family 19 member 1 | 122 |
| CD44 | CD44 antigen isoform 1 | 123 |
| RPL15 | ribosomal protein L15 | 126 |
| EEF1B2 | eukaryotic translation elongation factor 1 beta 2 | 129 |
| PNKP | polynucleotide kinase 3′ phosphatase | 131 |
| SEPT8 | septin 8 isoform a | 132 |
| EVPL | envoplakin | 136 |
| MYH14 | myosin, heavy chain 14 isoform 3 | 138 |
| RABGGTB | RAB geranylgeranyltransferase, beta subunit | 139 |
| RPL27 | ribosomal protein L27 | 140 |
| SIGMAR1 | sigma non-opioid intracellular receptor 1 | 143 |

[0298] In some embodiments, a gene that has a different translational level in the first translational profile as compared to the second translational profile is a gene having both a 5′ TOP sequence and a PRTE sequence. Non-limiting examples of genes having both a 5′ TOP sequence and a PRTE sequence are shown in Table 3 below. In some embodiments, translational levels are compared for the first translational profile and the second translational profile for 1, 2, 3, 4, 5, 6, 7, 8, 9, 10, 11, 12, 13, 14, 15, 16, 17, 18, 19, 20 or more genes selected from the genes listed in Table 3.

TABLE 3
5′ TOP and PRTE genomic positions in translationally regulated mTOR-
responsive genes having both 5′ TOP and PRTE

| | | | Strand | | PRTE |
|---|---|---|---|---|---|
| Gene | RefSeq ID | Chromosome | (+/−) | 5′ TOP Position | Position |
| AP2A1 | NM_014203 | 19 | + | 50270268 | 50270306 |
| CCNI | NM_006835 | 4 | − | 77997142 | 77997076 |
| CD44 | NM_000610 | 11 | + | 35160717 | 35160813 |
| CHP | NM_007236 | 15 | + | 41523519 | 41523536 |
| CRTAP | NM_006371 | 3 | + | 33155506/ | 33155540 |
| | | | | 33155554 | |
| eEF1A2 | NM_001958 | 20 | − | 62130436 | 62129175 |
| eEF1B2 | NM_021121 | 2 | + | 207024619 | 207024665 |
| eEF1G | NM_001404 | 11 | − | 62341490/ | 62341383 |
| | | | | 62341335 | |
| eEF2 | NM_001961 | 19 | − | 3985461 | 3985423 |
| eIF4B | NM_001417 | 12 | + | 53400240 | 53400250 |
| GAPDH | NM_002046 | 12 | + | 6643684 | 6643717 |
| GNB2L1 | NM_006098 | 5 | − | 180670906 | 180670818 |
| HNRNPA1 | NM_031157 | 12 | + | 54674529 | 54674571 |
| HSPA8 | NM_006597 | 11 | − | 122932844 | 122932806 |
| IPO7 | NM_006391 | 11 | + | 9406199 | 9406255 |
| LCMT1 | NM_016309 | 16 | + | 25123101 | 25123114 |
| NAP1L1 | NM_004537 | 12 | − | 76478465 | 76478429 |
| PABPC1 | NM_002568 | 8 | − | 101734315 | 101734151 |
| PACS1 | NM_018026 | 11 | + | 65837839 | 65837922 |
| PGM1 | NM_002633 | 1 | + | 64059078 | 64059107 |
| RABGGTB | NM_004582 | 1 | + | 76251941 | 76251928 |
| RPL10 | NM_006013 | X | + | 153626718 | 153626846 |
| RPL12 | NM_000976 | 9 | − | 130213677 | 130213648 |
| RPL13 | NM_000977/ | 16 | + | 89627090 | 89627102/ |
| | NM_033251 | | | | 89627202 |
| RPL14 | NM_001034996 | 3 | + | 40498830 | 40498906 |
| RPL15 | NM_002948 | 3 | + | 23958639 | 23958711 |
| RPL17 | NM_000985 | 18 | − | 47018849 | 47017964 |
| RPL22 | NM_000983 | 1 | − | 6259654 | 6259645 |
| RPL22L1 | NM_001099645 | 3 | − | 170587984 | 170587976 |
| RPL23 | NM_000978 | 17 | − | 37009989 | 37010013 |
| RPL29 | NM_000992 | 3 | − | 52029911 | 52029904 |
| RPL31 | NM_001098577 | 2 | + | 101618755 | 101618739 |
| RPL32 | NM_001007074 | 3 | − | 12883040 | 12883002 |
| RPL34 | NM_000995/ | 4 | + | 109541733 | 109541743/ |
| | NM_033625 | | | | 109541769 |
| RPL36 | NM_033643/ | 19 | + | 5690307 | 5690319/ |
| | NM_015414 | | | | 5690493 |
| RPL36A | NM_021029 | X | + | 100645999 | 100645981 |
| RPL37 | NM_000997 | 5 | − | 40835324 | 40835314 |
| RPL37A | NM_000998 | 2 | + | 217363567 | 217363526 |
| RPL39 | NM_001000 | X | − | 118925591 | 118925564 |
| RPL4 | NM_000968 | 15 | − | 66797185 | 66797143 |
| RPL41 | NM_001035267 | 12 | + | 56510417 | 56510539 |
| RPL5 | NM_000969 | 1 | + | 93297597 | 93297656 |
| RPL6 | NM_000970 | 12 | − | 112847409 | 112847256 |
| RPL8 | NM_000973/ | 8 | − | 146017775 | 146017709 |
| | NM_033301 | | | | |
| RPLP0 | NM_053275 | 12 | − | 120638910 | 120638652 |
| RPLP2 | NM_001004 | 11 | + | 809968 | 810006 |
| RPS10 | NM_001014 | 6 | − | 34393846 | 34393715 |
| RPS11 | NM_001015 | 19 | + | 49999690 | 49999677 |
| RPS14 | NM_001025070 | 5 | − | 149829300/ | 149829107 |
| | | | | 149829186 | |
| RPS15A | NM_001030009 | 16 | − | 18801656 | 18801604 |
| RPS2 | NM_002952 | 16 | − | 2014827 | 2014653 |
| RPS20 | NM_001146227 | 8 | − | 56987065 | 56986992 |
| RPS27A | NM_001177413 | 2 | + | 55459824 | 55459920 |
| RPS3A | NM_001006 | 4 | + | 152020780 | 152020789 |
| RPS5 | NM_001009 | 19 | + | 58898636 | 58898691 |
| RPS6 | NM_001010 | 9 | − | 19380234 | 19380207 |
| RPS9 | NM_001013 | 19 | + | 54704726 | 54704775 |
| SECTM1 | NM_003004 | 17 | − | 80291646 | 80291674/ |
| | | | | | 80291639 |
| TPT1 | NM_003295 | 13 | − | 45915318 | 45915222 |
| UBA52 | NM_003333 | 19 | + | 18682670 | 18683218 |
| VIM | NM_003380 | 10 | + | 17271277 | 17271358 |

[0299] In some embodiments, the method comprises:
[0300] (a) contacting the biological sample with an agent;
[0301] (b) determining a first translational profile for the contacted biological sample, wherein the translational profile comprises translational levels for one or more genes selected from the group consisting of SEQ ID NOs:1-144; and
[0302] (c) comparing the first translational profile to a second translational profile comprising translational levels for the one or more genes in a control sample that has not been contacted with the agent;
[0303] wherein a difference in the translational levels of the one or more genes in the first translation profile as compared to the second translation profile identifies the agent as a modulator of the oncogenic signaling pathway.

[0304] In some embodiments, translational levels are compared for the first translational profile and the second translational profile for 1, 2, 3, 4, 5, 6, 7, 8, 9, 10, 11, 12, 13, 14, 15, 16, 17, 18, 19, 20 or more genes selected from the group consisting of SEQ ID NOs:1-144. SEQ ID NOs:1-144 are listed in Table 4 below:

TABLE 4
Translationally regulated mTOR-responsive genes

| | | SEQ |
|---|---|---|
| Gene | Description | ID NO |
| EEF2 | eukaryotic translation elongation factor 2 | 1 |
| RPS12 | ribosomal protein S12 | 2 |
| RPL12 | ribosomal protein L12 | 3 |
| RPS2 | ribosomal protein S2 | 4 |
| RPL13A | ribosomal protein L13a | 5 |
| RPL18A | ribosomal protein L18a | 6 |
| EEF1A1 | eukaryotic translation elongation factor 1 alpha 1 | 7 |
| RPL28 | ribosomal protein L28 isoform 1 | 8 |
| RPS28 | ribosomal protein S28 | 9 |
| RPS27 | ribosomal protein S27 | 10 |
| RPL34 | ribosomal protein L34 | 11 |
| RPL27A | ribosomal protein L27a | 12 |
| RPL10 | ribosomal protein L10 | 13 |
| EEF1D | eukaryotic translation elongation factor 1 delta | 14 |
| GLTSCR2 | glioma tumor suppressor candidate region gene 2 | 15 |
| RPL3 | ribosomal protein L3 isoform a | 16 |
| PABPC1 | poly(A) binding protein, cytoplasmic 1 | 17 |
| RPL37A | ribosomal protein L37a | 18 |
| RPS5 | ribosomal protein S5 | 19 |
| RPL21 | ribosomal protein L21 | 20 |
| RPS15A | ribosomal protein S15a | 21 |
| GNB2L1 | guanine nucleotide binding protein (G protein) | 22 |
| RPL11 | ribosomal protein L11 | 23 |
| RPS20 | ribosomal protein S20 isoform 1 | 24 |
| RPL7A | ribosomal protein L7a | 25 |
| RPS19 | ribosomal protein S19 | 26 |
| RPS21 | ribosomal protein S21 | 27 |
| RPLP0 | ribosomal protein P0 | 28 |
| RPS9 | ribosomal protein S9 | 29 |
| RPS3 | ribosomal protein S3 | 30 |
| CRTAP | cartilage associated protein | 31 |
| FAM128B | hypothetical protein LOC80097 | 32 |
| RPL32 | ribosomal protein L32 | 33 |
| EEF1G | eukaryotic translation elongation factor 1, gamma | 34 |
| RPL22L1 | ribosomal protein L22-like 1 | 35 |
| YB1 | Y-box binding protein 1 | 36 |
| EIF4B | eukaryotic translation initiation factor 4B | 37 |
| RPLP2 | ribosomal protein P2 | 38 |
| RPS16 | ribosomal protein S16 | 39 |
| VIM | vimentin | 40 |
| GAMT | guanidinoacetate N-methyltransferase isoform b | 41 |
| HSPA8 | heat shock 70 kDa protein 8 isoform 1 | 42 |
| RPL39 | ribosomal protein L39 | 43 |
| AHCY | adenosylhomocysteinase isoform 1 | 44 |
| EEF1A2 | eukaryotic translation elongation factor 1 alpha 2 | 45 |
| RPL10A | ribosomal protein L10a | 46 |
| PABPC4 | poly A binding protein, cytoplasmic 4 isoform 1 | 47 |
| RPS4X | ribosomal protein S4, X-linked X isoform | 48 |
| RPL31 | ribosomal protein L31 isoform 2 | 49 |
| RPLP1 | ribosomal protein P1 isoform 1 | 50 |
| RPS11 | ribosomal protein S11 | 51 |
| RPL26 | ribosomal protein L26 | 52 |
| RPL14 | ribosomal protein L14 | 53 |
| RPL37 | ribosomal protein L37 | 54 |
| RPL7 | ribosomal protein L7 | 55 |
| HNRNPA1 | heterogeneous nuclear ribonucleoprotein A1 | 56 |
| RPS8 | ribosomal protein S8 | 57 |
| GAPDH | glyceraldehyde-3-phosphate dehydrogenase | 58 |
| RPL8 | ribosomal protein L8 | 59 |
| RPL29 | ribosomal protein L29 | 60 |
| RPS3A | ribosomal protein S3a | 61 |
| RPL18 | ribosomal protein L18 | 62 |
| RPL36 | ribosomal protein L36 | 63 |
| AGRN | agrin precursor | 64 |
| TPT1 | tumor protein, translationally-controlled 1 | 65 |
| RPL36A | ribosomal protein L36a | 66 |
| SLC25A5 | adenine nucleotide translocator 2 | 67 |
| TKT | transketolase isoform 1 | 68 |
| LMF2 | lipase maturation factor 2 | 69 |
| RPL13 | ribosomal protein L13 | 70 |
| CTSH | cathepsin H isoform b | 71 |
| FAM83H | FAM83H | 72 |
| RPS29 | ribosomal protein S29 isoform 2 | 73 |
| RPL23 | ribosomal protein L23 | 74 |
| RPS25 | ribosomal protein S25 | 75 |
| TUBB3 | tubulin, beta, 4 | 76 |
| RPS10 | ribosomal protein S10 | 77 |
| FASN | fatty acid synthase | 78 |
| RPL17 | ribosomal protein L17 | 79 |
| EIF2S3 | eukaryotic translation initiation factor 2, S3 | 80 |
| RPL30 | ribosomal protein L30 | 81 |
| ACTG1 | actin, gamma 1 propeptide | 82 |
| COL6A2 | alpha 2 type VI collagen isoform 2C2 | 83 |
| UBA52 | ubiquitin and ribosomal protein L40 precursor | 84 |
| ALKBH7 | spermatogenesis associated 11 precursor | 85 |
| RPL5 | ribosomal protein L5 | 86 |
| PGLS | 6-phosphogluconolactonase | 87 |
| CSDA | cold shock domain protein A | 88 |
| RPL6 | ribosomal protein L6 | 89 |
| RPS24 | ribosomal protein S24 isoform d | 90 |
| RPL22 | ribosomal protein L22 | 91 |
| AP2A1 | adaptor-related protein complex 2, alpha 1 | 92 |
| NAP1L1 | nucleosome assembly protein 1-like 1 | 93 |
| RPS14 | ribosomal protein S14 | 94 |
| ETHE1 | ETHE1 protein | 95 |
| CCNI | cyclin I | 96 |
| MTA1 | metastasis associated 1 | 97 |
| EIF3H | eukaryotic translation initiation factor 3, H | 98 |
| RPL9 | ribosomal protein L9 | 99 |
| RPS23 | ribosomal protein S23 | 100 |
| RPS6 | ribosomal protein S6 | 101 |
| RPS7 | ribosomal protein S7 | 102 |
| RPL19 | ribosomal protein L19 | 103 |
| RPL4 | ribosomal protein L4 | 104 |
| RPS13 | ribosomal protein S13 | 105 |
| C21orf66 | GC-rich sequence DNA-binding factor candidate | 106 |
| LCMT1 | leucine carboxyl methyltransferase 1 isoform a | 107 |
| EIF3L | eukaryotic translation initiation factor 3, L | 108 |
| IPO7 | importin 7 | 109 |
| PC | pyruvate carboxylase | 110 |
| RPS27A | ubiquitin and ribosomal protein S27a | 111 |
| SECTM1 | secreted and transmembrane 1 precursor | 112 |
| RPL41 | ribosomal protein L41 | 113 |
| TSC2 | tuberous sclerosis 2 isoform 1 | 114 |
| COL18A1 | alpha 1 type XVIII collagen isoform 3 | 115 |
| CHP | calcium binding protein P22 | 116 |
| PACS1 | phosphofurin acidic cluster sorting protein 1 | 117 |
| BRF1 | transcription initiation factor IIIB | 118 |
| PTGES2 | prostaglandin E synthase 2 | 119 |
| C2orf79 | hypothetical protein LOC391356 | 120 |
| PGM1 | phosphoglucomutase 1 | 121 |
| SLC19A1 | solute carrier family 19 member 1 | 122 |
| CD44 | CD44 antigen isoform 1 | 123 |
| RPL24 | ribosomal protein L24 | 124 |
| NCLN | nicalin | 125 |
| RPL15 | ribosomal protein L15 | 126 |
| CLPTM1 | cleft lip and palate associated transmembrane | 127 |
| ECSIT | evolutionarily conserved signaling intermediate | 128 |
| EEF1B2 | eukaryotic translation elongation factor 1 beta 2 | 129 |
| PFDN5 | prefoldin subunit 5 isoform alpha | 130 |
| PNKP | polynucleotide kinase 3′ phosphatase | 131 |
| SEPT8 | septin 8 isoform a | 132 |
| CIRBP | cold inducible RNA binding protein | 133 |
| ABCB7 | ATP-binding cassette, sub-family B, member 7 | 134 |
| ARD1A | alpha-N-acetyltransferase 1A | 135 |
| EVPL | envoplakin | 136 |
| LAMA5 | laminin alpha 5 | 137 |
| MYH14 | myosin, heavy chain 14 isoform 3 | 138 |
| RABGGTB | RAB geranylgeranyltransferase, beta subunit | 139 |
| RPL27 | ribosomal protein L27 | 140 |
| RPS15 | ribosomal protein S15 | 141 |
| IMPDH2 | inosine monophosphate dehydrogenase 2 | 142 |
| SIGMAR1 | sigma non-opioid intracellular receptor 1 | 143 |
| ATP5G2 | ATP synthase, H+ transporting, mitochondrial F0 | 144 |

[0305] In some embodiments, the first and/or second translational profile comprises 1, 2, 3, 4, 5, 6, 7, 8, 9, 10 or more genes that are functionally classified as a protein synthesis gene, a cell invasion/metastasis gene, a metabolism gene, a signal transduction gene, a cellular transport gene, a post-translational modification gene, an RNA synthesis and processing gene, a regulation of cell proliferation gene, a development gene, an apoptosis gene, a DNA repair gene, a DNA methylation gene, or an amino acid biosynthesis gene. In some embodiments, the first and/or second translational profile comprises 1, 2, 3, 4, 5, 6, 7, 8, 9, 10 or more genes from each of two, three, four, five, or more of these functional categories of genes. In some embodiments, first and/or second translational profile comprises 1, 2, 3, 4, 5, 6, 7, 8, 9, 10 more genes that are functionally classified as a cell invasion or metastasis gene. In some embodiments, the first and/or second translational profile comprises one or more of the cell invasion/metastasis genes YB1, vimentin, MTA1, and CD44. In some embodiments, the first and/or second translational profile comprises YB1, vimentin, MTA1, and CD44.

[0306] In some embodiments, the method comprises:
[0307] (a) contacting the biological sample with an agent;
[0308] (b) determining a first translational profile for the contacted biological sample, wherein the translational profile comprises a measurement of gene translational levels for a substantial portion of the genome;
[0309] (c) comparing the first translational profile to a second translational profile comprising a measurement of gene translational levels for the substantial portion of the genome translational levels for the one or more genes in a control sample that has not been contacted with the agent;
[0310] (d) identifying in the first translational profile a plurality of genes having decreased translational levels as compared to the translational levels of the plurality of genes in the second translational profile; and
[0311] (e) determining whether, for the plurality of genes identified in step (d), there is a common consensus sequence and/or regulatory element in the untranslated regions (UTRs) of the genes that is shared by at least 10% of the plurality of genes identified in step (d);
[0312] wherein a decrease in the translational levels of at least 10% of the genes sharing the common consensus sequence and/or UTR regulatory element in the first translational profile as compared to the second translational profile identifies the agent as an inhibitor of an oncogenic signaling pathway.

[0313] As used herein, the term “substantial portion of the genome,” with reference to a biological sample, can refer to an empirical number of genes being measured in the biological sample or to a percentage of the genes in the genome being measured in the biological sample. In some embodiments, a substantial portion of the genome comprises at least 500 genes, e.g., at least 500, 600, 700, 800, 900, 1000, 2000, 3000, 4000, 5000, 6000, 7000, 8000, 9000, 10,000, 11,000, 12,000, 13,000, 14,000, or 15,000 genes or more. In some embodiments, a substantial portion of the genome comprises at least about 0.01%, at least about 0.05%, at least about 0.1%, at least about 0.5%, at least about 1%, at least about 2%, at least about 3%, at least about 4%, at least about 5%, at least about 6%, at least about 7%, at least about 8%, at least about 9%, at least about 10%, at least about 11%, at least about 12%, at least about 13%, at least about 14%, at least about 15%, at least about 16%, at least about 17%, at least about 18%, at least about 19%, at least about 20%, at least about 25%, at least about 30%, at least about 35%, at least about 40%, at least about 45%, or at least about 50% of all genes in the genome for the biological sample.

[0314] In some embodiments, the oncogenic signaling pathway that is modulated is the mammalian target of rapamycin (mTOR) pathway, the PI3K pathway, the AKT pathway, the Ras pathway, the Myc pathway, the Wnt pathway, or the BRAF pathway. In some embodiments, the oncogenic signaling pathway that is modulated is the mTOR pathway.

[0315] In some embodiments, there is at least a 1.5-fold or at least 2-fold (e.g., at least 1.5-fold, at least 2-fold, at least 2.5-fold, at least 3-fold, at least 3.5-fold, at least 4-fold, at least 4.5-fold, at least 5-fold, at least 6-fold, at least 7-fold, at least 8-fold, at least 9-fold, at least 10-fold difference or more) in translational level for the one or more genes in the first translational profile as compared to the second translational profile. In some embodiments, there is at least a 1.5-fold or at least a 2-fold difference in translational level for 1, 2, 3, 4, 5, 6, 7, 8, 9, 10, 11, 12, 13, 14, 15, 16, 17, 18, 19, 20, 30, 40, 50, 60, 70, 80, 90, 100 or more genes in the first translational profile as compared to the second translational profile. In some embodiments, the translational level of one or more genes is decreased in the first translational profile as compared to the second translational profile. In some embodiments, the translational level of one or more genes in the first translational profile is decreased by at least 1.5-fold, at least two-fold, at least three-fold, at least four-fold, at least five-fold, at least six-fold, at least seven-fold, at least eight-fold, at least nine-fold, at least ten-fold or more as compared to the second translational profile. In some embodiments, the translational level of one or more genes is increased in the first translational profile as compared to the second translational profile. In some embodiments, the translational level of one or more genes in the first translational profile is increased by at least 1.5-fold, at least two-fold, at least three-fold, at least four-fold, at least five-fold, at least six-fold, at least seven-fold, at least eight-fold, at least nine-fold, at least ten-fold or more as compared to the second translational profile. In some embodiments, the translational level of one or more genes is decreased (e.g., by at least 1.5-fold, at least two-fold, at least three-fold, at least four-fold, at least five-fold, at least six-fold, at least seven-fold, at least eight-fold, at least nine-fold, at least ten-fold or more) in the first translational profile, while the translational level of another one or more genes is increased (e.g., by at least 1.5-fold, at least two-fold, at least three-fold, at least four-fold, at least five-fold, at least six-fold, at least seven-fold, at least eight-fold, at least nine-fold, at least ten-fold or more) in the first translational profile, as compared to the second translational profile.

[0316] C. Agents

[0317] In some embodiments, an agent that can be used according to the methods of the present invention is a peptide, protein, oligopeptide, circular peptide, peptidomimetic, antibody, polysaccharide, lipid, fatty acid, inhibitory RNA (e.g., siRNA, miRNA, or shRNA), polynucleotide, oligonucleotide, aptamer, small organic molecule, or drug compound. The agent can be either synthetic or naturally-occurring.

[0318] In some embodiments, the agent acts as a specific regulator of translational machinery or a component of translational machinery that alters the program of protein translation in cells (e.g., a small molecule inhibitor or inhibitory RNA). In some embodiments, the agent binds at the active site of a protein (e.g., an ATP site inhibitor of mTOR).

[0319] In some embodiments, multiple agents (e.g., 2, 3, 4, 5, or more agents) are used. In some embodiments, multiple agents are administered to a subject or contacted to a biological sample sequentially. In some embodiments, multiple agents are administered to a subject or contacted to a biological sample concurrently.

[0320] The agents described herein can be used at varying concentrations. In some embodiments, an agent is administered to a subject or contacted to a biological sample at a concentration that is known or expected to be a therapeutic dose. In some embodiments, an agent is administered to a subject or contacted to a biological sample at a concentration that is known or expected to be a sub-therapeutic dose. In some embodiments, an agent is administered to a subject or contacted to a biological sample at a concentration that is lower than a concentration that would typically be administered to an organism or applied to a sample, e.g., at a concentration that is 2, 3, 4, 5, 6, 7, 8, 9, 10, 15, 20, 25, 30, 35, 40, 45, 50, 60, 70, 80, 90, or 100 times less than the concentration that would typically be administered to an organism or applied to a sample.

[0321] In some embodiments, an agent can be identified from a library of agents. In some embodiments, the library of agents comprises at least about 5, 10, 15, 20, 25, 30, 35, 40, 45, 50, 60, 70, 80, 90, 100, 200, 300, 400, 500, 600, 700, 800, 900, 1000, 5000, 10,000, 20,000, 30,000, 40,000, 50,000 agents or more. It will be appreciated that there are many suppliers of chemical compounds, including Sigma (St. Louis, Mo.), Aldrich (St. Louis, Mo.), Sigma-Aldrich (St. Louis, Mo.), Fluka Chemika-Biochemica Analytika (Buchs Switzerland), as well as providers of small organic molecule and peptide libraries ready for screening, including Chembridge Corp. (San Diego, Calif.), Discovery Partners International (San Diego, Calif.), Triad Therapeutics (San Diego, Calif.), Nanosyn (Menlo Park, Calif.), Affymax (Palo Alto, Calif.), ComGenex (South San Francisco, Calif.), and Tripos, Inc. (St. Louis, Mo.). In some embodiments, the library is a combinatorial chemical or peptide library. A combinatorial chemical library is a collection of diverse chemical compounds generated by either chemical synthesis or biological synthesis, by combining a number of chemical “building blocks” such as reagents. For example, a linear combinatorial chemical library such as a polypeptide library is formed by combining a set of chemical building blocks (amino acids) in every possible way for a given compound length (i.e., the number of amino acids in a polypeptide compound). Millions of chemical compounds can be synthesized through such combinatorial mixing of chemical building blocks. The preparation and screening of chemical libraries is well known to those of skill in the art (see, e.g., Beeler et al., Curr Opin Chem. Biol., 9:277 (2005); and Shang et al., Curr Opin Chem. Biol., 9:248 (2005)).

[0322] In some embodiments, an agent for use in the methods of the present invention (e.g., an agent that modulates an oncogenic signaling pathway) can be identified by screening a library containing a large number of potential therapeutic compounds. The library can be screened in one or more assays, as described herein, to identify those library members that display a desired characteristic activity. The compounds thus identified can serve as conventional “lead compounds” (e.g., for identifying other potential therapeutic compounds) or can themselves be used as potential or actual therapeutics. Libraries of use in the present invention can be composed of amino acid compounds, nucleic acid compounds, carbohydrates, or small organic compounds. Carbohydrate libraries have been described in, for example, Liang et al., Science, 274:1520-1522 (1996); and U.S. Pat. No. 5,593,853.

[0323] Representative amino acid compound libraries include, but are not limited to, peptide libraries (see, e.g., U.S. Pat. Nos. 5,010,175; 6,828,422; and 6,844,161; Furka, Int. J. Pept. Prot. Res., 37:487-493 (1991); Houghton et al., Nature, 354:84-88 (1991); and Eichler, Comb Chem High Throughput Screen., 8:135 (2005)), peptoids (PCT Publication No. WO 91/19735), encoded peptides (PCT Publication No. WO 93/20242), random bio-oligomers (PCT Publication No. WO 92/00091), vinylogous polypeptides (Hagihara et al., J. Amer. Chem. Soc., 114:6568 (1992)), nonpeptidal peptidomimetics with β-D-glucose scaffolding (Hirschmann et al., J. Amer. Chem. Soc., 114:9217-9218 (1992)), peptide nucleic acid libraries (see, e.g., U.S. Pat. No. 5,539,083), antibody libraries (see, e.g., U.S. Pat. Nos. 6,635,424 and 6,555,310; PCT Application No. PCT/US96/10287; and Vaughn et al., Nature Biotechnology, 14:309-314 (1996)), and peptidyl phosphonates (Campbell et al., J. Org. Chem., 59:658 (1994)).

[0324] Representative nucleic acid compound libraries include, but are not limited to, genomic DNA, cDNA, mRNA, inhibitory RNA (e.g., RNAi, siRNA), and antisense RNA libraries. See, e.g., Ausubel, Current Protocols in Molecular Biology, eds. 1987-2005, Wiley Interscience; and Sambrook and Russell, Molecular Cloning: A Laboratory Manual, 2000, Cold Spring Harbor Laboratory Press. Nucleic acid libraries are described in, for example, U.S. Pat. Nos. 6,706,477; 6,582,914; and 6,573,098. cDNA libraries are described in, for example, U.S. Pat. Nos. 6,846,655; 6,841,347; 6,828,098; 6,808,906; 6,623,965; and 6,509,175. RNA libraries, for example, ribozyme, RNA interference, or siRNA libraries, are described in, for example, Downward, Cell, 121:813 (2005) and Akashi et al., Nat. Rev. Mol. Cell. Biol., 6:413 (2005). Antisense RNA libraries are described in, for example, U.S. Pat. Nos. 6,586,180 and 6,518,017.

[0325] Representative small organic molecule libraries include, but are not limited to, diversomers such as hydantoins, benzodiazepines, and dipeptides (Hobbs et al., Proc. Nat. Acad. Sci. USA, 90:6909-6913 (1993)); analogous organic syntheses of small compound libraries (Chen et al., J. Amer. Chem. Soc., 116:2661 (1994)); oligocarbamates (Cho et al., Science, 261:1303 (1993)); benzodiazepines (e.g., U.S. Pat. No. 5,288,514; and Baum, C& EN, January 18, page 33 (1993)); isoprenoids (e.g., U.S. Pat. No. 5,569,588); thiazolidinones and metathiazanones (e.g., U.S. Pat. No. 5,549,974); pyrrolidines (e.g., U.S. Pat. Nos. 5,525,735 and 5,519,134); morpholino compounds (e.g., U.S. Pat. No. 5,506,337); tetracyclic benzimidazoles (e.g., U.S. Pat. No. 6,515,122); dihydrobenzpyrans (e.g., U.S. Pat. No. 6,790,965); amines (e.g., U.S. Pat. No. 6,750,344); phenyl compounds (e.g., U.S. Pat. No. 6,740,712); azoles (e.g., U.S. Pat. No. 6,683,191); pyridine carboxamides or sulfonamides (e.g., U.S. Pat. No. 6,677,452); 2-aminobenzoxazoles (e.g., U.S. Pat. No. 6,660,858); isoindoles, isooxyindoles, or isooxyquinolines (e.g., U.S. Pat. No. 6,667,406); oxazolidinones (e.g., U.S. Pat. No. 6,562,844); and hydroxylamines (e.g., U.S. Pat. No. 6,541,276).

[0326] Devices for the preparation of libraries are commercially available. See, e.g., 357 MPS and 390 MPS from Advanced Chem. Tech (Louisville, Ky.), Symphony from Rainin Instruments (Woburn, Mass.), 433A from Applied Biosystems (Foster City, Calif.), and 9050 Plus from Millipore (Bedford, Mass.).

[0327] D. Undruggable Targets

[0328] In some embodiments, the methods of the present invention relate to identifying an agent that modulates an undruggable target. It is estimated that only about 10-15% of human proteins are disease modifying, and of these proteins, as many as 85-90% are “undruggable,” meaning that even though theoretical therapeutic benefits may be experimentally observed for these target proteins (e.g., in vitro or in a model system in vivo using techniques such as shRNA), targeted therapy using a drug compound (e.g., a small molecule or antibody) does not successfully interfere with the biological function of the protein (or of the gene encoding the protein). Typically, an undruggable target is a protein that lacks a binding site for small molecules or for which binding of small molecules does not alter biological function (e.g., ribosomal proteins); a protein for which, despite having a small molecule binding site, successful targeting of said site has proven intractable in practice (e.g., GTP/GDP proteins); or a protein for which selectivity of small molecule binding has not been obtained due to close homology of the binding site with other proteins, and for which binding of the small molecule to these other proteins obviates the therapeutic benefit that is theoretically achievable with binding to the target protein (e.g., protein phosphatases). A target may be undruggable to antibody-based therapeutics for a variety of reasons, such as intracellular location of the target, masking of target antigenicity (e.g., due to modification with carbohydrate or other masking modifications), escape by competition (e.g., by shedding or release of decoy molecules), or the like. By preferentially inhibiting the synthesis of such a target protein by selectively inhibiting programmed translation of a small set of proteins (e.g., about 1, 2, 3, 4, 5, 6, 7, 8, 9, 10, 15, or 20 proteins), it is possible to modulate (e.g., inhibit) the activity of the “undruggable” target protein.

[0329] In some embodiments, a method of identifying an agent that modulates an undruggable target comprises:
[0330] (a) contacting a biological sample with an agent;
[0331] (b) determining a first translational profile for the contacted biological sample, wherein the translational profile comprises translational levels for a plurality of genes; and
[0332] (c) comparing the first translational profile to a second translational profile comprising translational levels for the plurality of genes in a control sample that has not been contacted with the agent;
[0333] wherein identifying one or more genes as differentially translated in the first translational profile as compared to the second translational profile identifies the agent as modulating the activity of the undruggable target. In some embodiments, one or more genes of a biological pathway are differentially translated in the first translational profile as compared to the second translational profile, wherein the biological pathway is selected from a protein synthesis pathway, a cell invasion/metastasis pathway, a cell division pathway, an apoptosis pathway, a signal transduction pathway, a cellular transport pathway, a post-translational protein modification pathway, a DNA repair pathway, and DNA methylation pathway.

[0334] In some embodiments, one or more genes from each of at least two, at least three, at least four, at least five, or more of the biological pathways is differentially translated in the first translational profile as compared to the second translational profile. In some embodiments, two, three, four, five or more genes (e.g., 1, 2, 3, 4, 5, 6, 7, 8, 9, 10, 11, 12, 13, 14, 15, 16, 17, 18, 19, 20, 30, 40, 50, 60, 70, 80, 90, 100 or more genes) from one or more of the biological pathways are differentially translated in the first translational profile as compared to the second translational profile. Non-limiting examples of protein synthesis, cell invasion/metastasis, cell division, apoptosis pathway, signal transduction, cellular transport, post-translational protein modification, DNA repair, and DNA methylation pathways are described herein.

[0335] In some embodiments, the first and/or second translational profile comprises translational levels for a plurality of genes in the biological sample. In some embodiments, the first and/or second translational profile comprises translational levels for at least 2, 3, 4, 5, 6, 7, 8, 9, 10, 11, 12, 13, 14, 15, 16, 17, 18, 19, 20, 25, 30, 35, 40, 45, 50, 60, 70, 80, 90, 100, 150, 200, 250, 300, 350, 400, 450, 500, 550, 600, 650, 700, 750, 800, 850, 900, 950, 1000, 1500, 2000, 2500, 3000, 3500, 4000, 4500, 5000, 5500, 6000, 6500, 7000, 7500, 8000, 8500, 9000, 9500, 10,000 genes or more in the biological sample. In some embodiments, the first and/or second translational profile comprises translational levels for at least about 1%, 2%, 3%, 4%, 5%, 6%, 7%, 8%, 9%, 10%, 11%, 12%, 13%, 14%, 15%, 16%, 17%, 18%, 19%, 20%, 25%, 30%, 35%, 40%, 45%, 50% of all genes in the biological sample or more. In some embodiments, the first and/or second translational profile comprises a genome-wide measurement of gene translational levels in the biological sample.

[0336] In some embodiments, there is at least a 1.5-fold or at least a two-fold difference in translational level for the one or more genes (e.g., for 1, 2, 3, 4, 5, 6, 7, 8, 9, 10, 11, 12, 13, 14, 15, 16, 17, 18, 19, 20, 30, 40, 50, 60, 70, 80, 90, 100 or more genes) in the first translational profile as compared to the second translational profile. In some embodiments, there is at least a three-fold difference, at least a four-fold difference, at least a five-fold difference, at least a six-fold difference, at least a seven-fold difference, at least an eight-fold difference, at least a nine-fold difference, at least a ten-fold difference or more in the translational level for the one or more genes in the first translational profile as compared to the second translational profile. In some embodiments, the translational level of the one or more genes is decreased in the first translational profile as compared to the second translational profile. In some embodiments, the translational level of the one or more genes is increased in the first translational profile as compared to the second translational profile. In some embodiments, the translational level of one or more genes is decreased in the first translational profile, while the translational level of another one or more genes is increased in the first translational profile, as compared to the second translational profile.

[0337] In some embodiments, the agent is an RNA molecule. In some embodiments, the agent is an shRNA, siRNA, or miRNA molecule.

[0338] E. Synthesizing and Validating Agents Based on Identified Agents

[0339] In some embodiments, an agent that is identified as modulating an oncogenic signaling pathway is optimized in order to improve the agent's biological and/or pharmacological properties. To optimize the agent, structurally related analogs of the agent can be chemically synthesized to systematically modify the structure of the initially-identified agent.

[0340] For chemical synthesis, solid phase synthesis can be used for compounds such as peptides, nucleic acids, organic molecules, etc., since in general solid phase synthesis is a straightforward approach with excellent scalability to commercial scale. Techniques for solid phase synthesis are described in the art. See, e.g., Seneci, Solid Phase Synthesis and Combinatorial Technologies (John Wiley & Sons 2002); Barany & Merrifield, Solid-Phase Peptide Synthesis, pp. 3-284 in The Peptides: Analysis, Synthesis, Biology, Vol. 2 (E. Gross and J. Meienhofer, eds., Academic Press 1979).

[0341] The synthesized structurally related analogs can be screened to determine whether the analogs induce a similar translational profile when contacted to a biological sample as compared to the initial agent from which the analog was derived. In some embodiments, a selected-for structurally related analog is one that induces an identical or substantially identical translational profile in a biological sample as the initial agent from which the structurally related analog was derived.

[0342] A structurally related analog that is determined to induce a sufficiently similar translational profile in a biological sample as the initial agent from which the structurally related analog was derived can be further screened for biological and pharmacological properties, including but not limited to oral bioavailability, half-life, metabolism, toxicity, and pharmacodynamic activity (e.g., duration of the therapeutic effect) according to methods known in the art. Typically, the screening of the structurally related analogs is performed in vivo in an appropriate animal model (e.g., a mammal such as a mouse or rat). Animal models for analyzing pharmacological and pharmacokinetic properties, including animal models for various disease states, are well known in the art and are commercially available, e.g., from Charles River Laboratories Intl, Inc. (Wilmington, Mass.).

[0343] In some embodiments, an agent that is identified as having a suitable biological profile, or a structurally related analog thereof, is used for the preparation of a medicament for the treatment of a disease or condition associated with the modulation of the biological pathway (e.g., a cancer associated with the modulation of the mTOR pathway).

### V. Methods of Validating a Target for Therapeutic Intervention

[0344] In another aspect, the present invention provides methods of validating a target for therapeutic intervention. In some embodiments, the present invention provides a method of validating a target for therapeutic intervention when treatment mimics the translational effect of a known active compound. In some embodiments, the method comprises:
[0345] (a) contacting a biological sample with an agent that modulates the target;
[0346] (b) determining a first translational profile for the contacted biological sample, wherein the first translational profile comprises translational levels for a plurality of genes; and
[0347] (c) comparing the first translational profile to a second translational profile comprising translational levels for the plurality of genes in a control sample that has not been contacted with the agent;
[0348] wherein identifying one or more genes of a biological pathway as differentially translated in the first translational profile as compared to the second translational profile validates the target for therapeutic intervention, wherein said biological pathway is selected from a protein synthesis pathway, a cell invasion/metastasis pathway, a cell division pathway, an apoptosis pathway, a signal transduction pathway, a cellular transport pathway, a post-translational protein modification pathway, a DNA repair pathway, and a DNA methylation pathway.

[0349] In some embodiments, translational levels are compared for the first translational profile and the second translational profile for 1, 2, 3, 4, 5, 6, 7, 8, 9, 10, 11, 12, 13, 14, 15, 16, 17, 18, 19, 20 or more genes in one or more biological pathways selected from a protein synthesis pathway, a cell invasion/metastasis pathway, a cell division pathway, an apoptosis pathway, a signal transduction pathway, a cellular transport pathway, a post-translational protein modification pathway, a DNA repair pathway, and a DNA methylation pathway. In some embodiments, one or more genes from each of at least two of the biological pathways are differentially translated in the first translational profile as compared to the second translational profile. In some embodiments, one or more genes from each of at least three of the biological pathways are differentially translated in the first translational profile as compared to the second translational profile. In some embodiments, the biological pathway, or one of the biological pathways, is the mTOR pathway.

[0350] In some embodiments, translational levels are compared for the first and second translational profiles for one or more genes in a protein synthesis pathway. Examples of protein synthesis pathway genes include, but are not limited to, EEF2, RPS12, RPL12, RPS2, RPL13A, RPL18A, EEF1A1, RPL28, RPS28, and RPS27. In some embodiments, translational levels are compared for the first and second translational profiles for one or more genes in a cell invasion/metastasis pathway. Examples of cell invasion/metastasis pathway genes include, but are not limited to, YB1, MTA1, Vimentin, and CD44. In some embodiments, translational levels are compared for the first and second translational profiles for one or more genes in a cell division pathway. Examples of cell division pathway genes include, but are not limited to, CCNI. In some embodiments, translational levels are compared for the first and second translational profiles for one or more genes in an apoptosis pathway. Examples of apoptosis pathway genes include, but are not limited to, ARF, FADD, TNFRSF21, BAX, DAPK, TMS-1, BCL2, RASSF1A, and TERT. In some embodiments, translational levels are compared for the first and second translational profiles for one or more genes in a signal transduction pathway. Examples of signal transduction pathway genes include, but are not limited to, MAPK, MYC, RAS, and RAF. In some embodiments, translational levels are compared for the first and second translational profiles for one or more genes in a cellular transport pathway. Examples of cellular transport pathway genes include, but are not limited to, SLC25A5. In some embodiments, translational levels are compared for the first and second translational profiles for one or more genes in a post-translational protein modification pathway. Examples of post-translational protein modification pathway genes include, but are not limited to, LCMT1 and RABGGTB. In some embodiments, translational levels are compared for the first and second translational profiles for one or more genes in a DNA repair pathway. Examples of DNA repair pathway genes include, but are not limited to, PNKP. In some embodiments, translational levels are compared for the first and second translational profiles for one or more genes in a DNA methylation pathway. Examples of DNA methylation pathway genes include, but are not limited to, AHCY.

[0351] In some embodiments, the one or more genes has a 5′ TOP sequence, a PRTE sequence, or both a 5′ TOP sequence and a PRTE sequence. In some embodiments, the one or more genes is selected from the genes listed in Table 1, Table 2, and/or Table 3. In some embodiments, the one or more genes is selected from the group consisting of SEQ ID NOs:1-144.

[0352] In some embodiments, the target for therapeutic intervention is a part of an oncogenic signaling pathway. In some embodiments, the oncogenic signaling pathway is the mammalian target of rapamycin (mTOR) pathway, the PI3K pathway, the AKT pathway, the Ras pathway, the Myc pathway, the Wnt pathway, or the BRAF pathway. In some embodiments, the oncogenic signaling pathway that is modulated is the mTOR pathway.

[0353] In some embodiments, a method for validating a target for therapeutic intervention in a disease (e.g., an inflammatory disease, an autoimmune disease, a fibrotic disorder, a neurodegenerative disease, a neurodevelopmental disease, a metabolic disease, a viral infection, a cardiomyopathy or a cancer), comprises:
[0354] (a) determining a first translational profile for a plurality of genes from a disease sample contacted with an agent that modulates a target;
[0355] (b) determining a second translational profile for a plurality of genes from a control disease sample not contacted with the agent; and
[0356] (c) validating the target for therapeutic intervention in the disease (e.g., an inflammatory disease, an autoimmune disease, a fibrotic disorder, a neurodegenerative disease, a neurodevelopmental disease, a metabolic disease, a viral infection, a cardiomyopathy or a cancer, respectively) when one or more genes are differentially translated in the first translational profile as compared to the second translational profile and when the differential translation results in a biological benefit.

[0357] In some embodiments, a method for validating a target for therapeutic intervention in a disease (e.g., an inflammatory disease, an autoimmune disease, a fibrotic disorder, a neurodegenerative disease, a neurodevelopmental disease, a metabolic disease, a viral infection, a cardiomyopathy or a cancer), comprises:
[0358] (a) determining a first translational profile for a plurality of genes from a disease sample contacted with an agent that modulates a target;
[0359] (b) determining a second translational profile for a plurality of genes from a disease sample contacted with a known active compound for treating the disease; and
[0360] (c) validating the target for therapeutic intervention in a disease (e.g., an inflammatory disease, an autoimmune disease, a fibrotic disorder, a neurodegenerative disease, a neurodevelopmental disease, a metabolic disease, a viral infection, a cardiomyopathy or a cancer, respectively) when the first translational profile is comparable to the second translational profile.

[0361] In certain embodiments, a method for validating a target for therapeutic intervention in a disease (e.g., an inflammatory disease, an autoimmune disease, a fibrotic disorder, a neurodegenerative disease, a neurodevelopmental disease, a metabolic disease, a viral infection, a cardiomyopathy or a cancer), comprises:
[0362] (a) determining three independent translational profiles, each for a plurality of genes from a disease sample, wherein (i) a first translational profile is from the sample not contacted with any compound, (ii) a second translational profile is from the sample contacted with an agent that modulates a target, and (iii) a third translational profile is from the sample contacted with a known active compound for treating the disease;
[0363] (b) identifying one or more genes as differentially translated in the first translational profile as compared to the second translational profile; and
[0364] (c) validating the target as a target for therapeutic intervention in the disease (e.g., an inflammatory disease, an autoimmune disease, a fibrotic disorder, a neurodegenerative disease, a neurodevelopmental disease, a metabolic disease, a viral infection, a cardiomyopathy or a cancer, respectively) when the one or more differentially translated genes from step (b) are in the third translational profile and have a translational profile closer to the translational profile of the one or more genes in the second translational profile than to the translational profile of the one or more genes in the first translational profile.

[0365] In certain embodiments, a method for validating a target for therapeutic intervention in a disease (e.g., an inflammatory disease, an autoimmune disease, a fibrotic disorder, a neurodegenerative disease, a neurodevelopmental disease, a metabolic disease, a viral infection, a cardiomyopathy or a cancer), comprises:
[0366] (a) determining three independent translational profiles, each for a plurality of genes from a disease sample, wherein (i) a first translational profile is from the sample not contacted with any compound, (ii) a second translational profile is from the sample contacted with an agent that modulates a target, and (iii) a third translational profile is from the sample contacted with a known active compound for treating the disease;
[0367] (b) determining a first differential translational profile comprising one or more genes differentially translated in the first translational profile as compared to the second translational profile, and determining a second differential translational profile comprising one or more genes differentially translated in the first translational profile as compared to the third translational profile; and
[0368] (c) validating the target as a target for therapeutic intervention in the disease (e.g., an inflammatory disease, an autoimmune disease, a fibrotic disorder, a neurodegenerative disease, a neurodevelopmental disease, a metabolic disease, a viral infection, a cardiomyopathy or a cancer, respectively) when the first differential translational profile is comparable to the second differential translational profile.

[0369] In any of the aforementioned embodiments for validating a target, the target is suspected of being associated with a disease, is indirectly associated with a disease, or is associated with a disease (e.g., an inflammatory disease, an autoimmune disease, a fibrotic disorder, a neurodegenerative disease, a neurodevelopmental disease, a metabolic disease, a viral infection, a cardiomyopathy or a cancer).

[0370] Agents that can be used to validate a target for therapeutic intervention include any agent described herein (e.g., in Section IV(C) above), and include but are not limited to, peptides, proteins, oligopeptides, circular peptides, peptidomimetics, antibodies, polysaccharides, lipids, fatty acids, inhibitory RNAs (e.g., siRNA, miRNA, or shRNA), polynucleotides, oligonucleotides, aptamers, small organic molecules, or drug compounds. In some embodiments, the agent is a small organic molecule. In some embodiments, the agent is a peptide or protein. In some embodiments, the agent is an RNA or inhibitory RNA.

[0371] The translational profiles that are generated for validating a target for therapeutic intervention can be generated according to any of the methods described herein. In some embodiments, the translational profiles are generated by ribosomal profiling. In some embodiments, the translational profiles are generated by polysome microarray. In some embodiments, the translational profiles are generated by immunoassay. In some embodiments, the translational profiles comprise translational levels for 2, 3, 4, 5, 6, 7, 8, 9, 10, 11, 12, 13, 14, 15, 16, 17, 18, 19, 20, 25, 30, 35, 40, 45, 50, 60, 70, 80, 90, 100, 150, 200, 250, 300, 350, 400, 450, 500, 550, 600, 650, 700, 750, 800, 850, 900, 950, 1000, 1500, 2000, 2500, 3000, 3500, 4000, 4500, 5000, 5500, 6000, 6500, 7000, 7500, 8000, 8500, 9000, 9500, 10,000 genes or more in the biological sample. In some embodiments, the first and/or second translational profile comprises translational levels for at least about 1%, 2%, 3%, 4%, 5%, 6%, 7%, 8%, 9%, 10%, 11%, 12%, 13%, 14%, 15%, 16%, 17%, 18%, 19%, 20%, 25%, 30%, 35%, 40%, 45%, 50% or more of all genes in the biological sample. In some embodiments, the translational profiles comprise genome-wide measurements of gene translational levels.

[0372] In some embodiments, a target is validated when one or more genes of one or more biological pathways is differentially translated by at least 1.5-fold or at least two-fold (e.g., at least 1.5-fold, at least two-fold, at least three-fold, at least four-fold, at least five-fold, at least six-fold, at least seven-fold, at least eight-fold, at least nine-fold, at least ten-fold or more) in the first translational profile as to the second translational profile. In some embodiments, a target is validated when the translational level for one or more genes of one or more biological pathways is decreased by at least 1.5-fold or at least two-fold (e.g., at least 1.5-fold, at least two-fold, at least three-fold, at least four-fold, at least five-fold, at least six-fold, at least seven-fold, at least eight-fold, at least nine-fold, at least ten-fold or more) in the first translational profile as to the second translational profile. In some embodiments, a target is validated when the translational level for one or more genes of one or more biological pathways is increased by at least 1.5-fold or at least two-fold (e.g., at least 1.5-fold, at least two-fold, at least three-fold, at least four-fold, at least five-fold, at least six-fold, at least seven-fold, at least eight-fold, at least nine-fold, at least ten-fold or more) in the first translational profile as to the second translational profile. In some embodiments, less than 20% of the genes in the genome are differentially translated by at least 1.5-fold or at least two-fold in the first translational profile as compared to the second translational profile. In some embodiments, less than 5% of the genes in the genome are differentially translated by at least 1.5-fold, at least 2-fold, at least 3-fold, or at least 4-fold in the first translational profile as compared to the second translational profile. In some embodiments, less than 1% of the genes in the genome are differentially translated by at least 1.5-fold, at least 2-fold, at least 3-fold, at least 4-fold, or at least 5-fold in the first translational profile as compared to the second translational profile.

[0373] In some embodiments, a target is validated when a first differential translational profile is comparable to a second differential translational profile, e.g., when at least of 99%, 95%, 90%, 85%, 80%, 75%, 70%, 65%, 60%, 55%, or 50% of a selected portion of differentially translated genes, a majority of differentially translated genes, or all differentially translated genes show a translational profile within 75%, 70%, 65%, 60%, 55%, 50%, 45%, 40%, 35%, 30%, or 25%, respectively, of their corresponding genes in the reference translational profile. In further embodiments, a first differential translational profile comprising a selected portion of the differentially translated genes or all the differentially translated genes has a differential translational profile comparable to the differential translational profile of the same genes in a second differential translational profile when the amount of protein translated in the first and second differential translational profiles are within about 3.0 log₂, 2.5 log₂, 2.0 log₂, 1.5 log₂, 1.1 log₂, 0.5 log₂, 0.2 log₂ or closer. In still further embodiments, a first differential translational profile comprising a selected portion of the differentially translated genes or all the differentially translated genes has a differential translational profile comparable to the differential translational profile of the same genes in a second differential translational profile when the amount of protein translated in the first and second differential translational profiles differs by no more than about 50%, 40%, 35%, 30%, 25%, 20%, 15%, 10%, 5%, 1% or less.

[0374] In some embodiments, a target is validated when the translational profiles comprise one or more gene signatures, wherein one or more gene signatures are comparable in the first and second translational profiles. In certain embodiments, the first and second translational profiles are comparable when an amount of protein translated from one or more differentially translated genes in the first and second translational profiles differs by no more than about 50%, 40%, 35%, 30%, 25%, 20%, 15%, 10%, 5%, 1% or less. In further embodiments, the one or more differentially translated genes from the third translational profile have a translational profile closer to the translational profile of the one or more genes in the second translational profile when the amount of protein translated from the one or more differentially translated genes in the third and second translational profiles differs by no more than about 50%, 40%, 35%, 30%, 25%, 20%, 15%, 10%, 5%, 1% or less.

### VI. Methods of Identifying Drug Candidate Molecules or Agents

[0375] In another aspect, the present invention comprises a method of identifying a drug candidate molecule. In some embodiments, the method comprises:
[0376] (a) contacting a biological sample with the drug candidate molecule;
[0377] (b) determining a translational profile for the contacted biological sample, wherein the translational profile comprises translational levels for a plurality of genes; and
[0378] (c) comparing the first translational profile to a second translational profile comprising translational levels for the plurality of genes in a control sample that has not been contacted with the drug candidate molecule,
[0379] wherein the drug candidate molecule is identified as suitable for use in a therapeutic intervention when one or more genes of a biological pathway is differentially translated in the first translational profile as compared to the second translational profile, wherein the biological pathway is selected from a protein synthesis pathway, a cell invasion/metastasis pathway, a cell division pathway, an apoptosis pathway, a signal transduction pathway, a cellular transport pathway, a post-translational protein modification pathway, a DNA repair pathway, and DNA methylation pathway.

[0380] In some embodiments, the one or more genes (e.g., 1, 2, 3, 4, 5, 6, 7, 8, 9, 10 or more genes) have a 5′ TOP sequence, a PRTE sequence, or both a 5′ TOP sequence and a PRTE sequence. In some embodiments, the one or more genes is selected from the genes listed in Table 1, Table 2, and/or Table 3. In some embodiments, the one or more genes (e.g., 1, 2, 3, 4, 5, 6, 7, 8, 9, 10 or more genes) are selected from the group consisting of SEQ ID NOs:1-144. In some embodiments, one or more genes from each of at least two of the biological pathways are differentially translated in the first translational profile as compared to the second translational profile. In some embodiments, one or more genes from each of at least three of the biological pathways are differentially translated in the first translational profile as compared to the second translational profile. In certain embodiments, the one or more differentially translated genes comprise a plurality of genes and optionally the plurality of differentially translated genes may comprise one or more gene signatures.

[0381] In some embodiments, translational levels are compared for the first and second translational profiles for one or more genes in a protein synthesis pathway. Examples of protein synthesis pathway genes include, but are not limited to, EEF2, RPS12, RPL12, RPS2, RPL13A, RPL18A, EEF1A1, RPL28, RPS28, and RPS27. In some embodiments, translational levels are compared for the first and second translational profiles for one or more genes in a cell invasion/metastasis pathway. Examples of cell invasion/metastasis pathway genes include, but are not limited to, YB1, MTA1, Vimentin, and CD44. In some embodiments, translational levels are compared for the first and second translational profiles for one or more genes in a cell division pathway. Examples of cell division pathway genes include, but are not limited to, CCNI. In some embodiments, translational levels are compared for the first and second translational profiles for one or more genes in an apoptosis pathway. Examples of apoptosis pathway genes include, but are not limited to, ARF, FADD, TNFRSF21, BAX, DAPK, TMS-1, BCL2, RASSF1A, and TERT. In some embodiments, translational levels are compared for the first and second translational profiles for one or more genes in a signal transduction pathway. Examples of signal transduction pathway genes include, but are not limited to, MAPK, MYC, RAS, and RAF. In some embodiments, translational levels are compared for the first and second translational profiles for one or more genes in a cellular transport pathway. Examples of cellular transport pathway genes include, but are not limited to, SLC25A5. In some embodiments, translational levels are compared for the first and second translational profiles for one or more genes in a post-translational protein modification pathway. Examples of post-translational protein modification pathway genes include, but are not limited to, LCMT1 and RABGGTB. In some embodiments, translational levels are compared for the first and second translational profiles for one or more genes in a DNA repair pathway. Examples of DNA repair pathway genes include, but are not limited to, PNKP. In some embodiments, translational levels are compared for the first and second translational profiles for one or more genes in a DNA methylation pathway. Examples of DNA methylation pathway genes include, but are not limited to, AHCY.

[0382] In some embodiments, a method for identifying a drug candidate molecule or agent for treating a disease (e.g., an inflammatory disease, an autoimmune disease, a fibrotic disorder, a neurodegenerative disease, a neurodevelopmental disease, a metabolic disease, a viral infection, a cardiomyopathy or a cancer), comprises:
[0383] (a) determining a first translational profile for a plurality of genes from a disease sample contacted with a candidate agent;
[0384] (b) determining a second translational profile for a plurality of genes from a control disease sample not contacted with the agent; and
[0385] (c) identifying the agent as a candidate therapeutic for use in treating a disease (e.g., an inflammatory disease, an autoimmune disease, a fibrotic disorder, a neurodegenerative disease, a neurodevelopmental disease, a metabolic disease, a viral infection, a cardiomyopathy or a cancer, respectively) when one or more genes are differentially translated in the first translational profile as compared to the second translational profile and when the differential translation results in a biological benefit.

[0386] In certain embodiments, the plurality of differentially translated genes may comprise a plurality of genes, one or more biological pathways, one or more gene signatures, or any combination thereof. A disease sample may be obtained from any subject having a disease of interest to identify drug candidate molecules or agents that affect translational profiles in such samples. In certain embodiments, a biological sample is obtained from a subject who has or is suspected of having a disease, such as an inflammatory disease, an autoimmune disease, a fibrotic disorder, a neurodegenerative disease, a neurodevelopmental disease, a metabolic disease, a viral infection, a cardiomyopathy, or a cancer.

[0387] The translational profiles that are generated for identifying a drug candidate molecule or agent can be generated according to any of the methods described herein. In some embodiments, the translational profiles are generated by ribosomal profiling. In some embodiments, the translational profiles are generated by polysome microarray. In some embodiments, the translational profiles are generated by immunoassay. In some embodiments, the translational profiles comprise translational levels for at least 2, 3, 4, 5, 6, 7, 8, 9, 10, 11, 12, 13, 14, 15, 16, 17, 18, 19, 20, 25, 30, 35, 40, 45, 50, 60, 70, 80, 90, 100, 150, 200, 250, 300, 350, 400, 450, 500, 550, 600, 650, 700, 750, 800, 850, 900, 950, 1000, 1500, 2000, 2500, 3000, 3500, 4000, 4500, 5000, 5500, 6000, 6500, 7000, 7500, 8000, 8500, 9000, 9500, 10,000 genes or more in the biological sample. In some embodiments, the first and/or second translational profile comprises translational levels for at least about 0.1%, 0.5%, 1%, 2%, 3%, 4%, 5%, 6%, 7%, 8%, 9%, 10%, 11%, 12%, 13%, 14%, 15%, 16%, 17%, 18%, 19%, 20%, 25%, 30%, 35%, 40%, 45%, 50% or more of all genes in the biological sample. In some embodiments, the translational profiles comprise genome-wide measurements of gene translational levels.

[0388] In some embodiments, a drug candidate molecule or agent is identified as suitable for use in a therapeutic intervention when one or more genes of one or more biological pathways is differentially translated by at least 1.5-fold or at least two-fold (e.g., at least 1.5-fold, at least two-fold, at least three-fold, at least four-fold, at least five-fold, at least six-fold, at least seven-fold, at least eight-fold, at least nine-fold, at least ten-fold or more) in the first translational profile as to the second translational profile. In some embodiments, a drug candidate molecule is identified as suitable for use in a therapeutic intervention when the translational level for one or more genes of one or more biological pathways is decreased by at least 1.5-fold or at least two-fold (e.g., at least 1.5-fold, at least two-fold, at least three-fold, at least four-fold, at least five-fold, at least six-fold, at least seven-fold, at least eight-fold, at least nine-fold, at least ten-fold or more) in the first translational profile as to the second translational profile. In some embodiments, a drug candidate molecule is identified as suitable for use in a therapeutic intervention when the translational level for one or more genes of one or more biological pathways is increased by at least 1.5-fold or at least two-fold (e.g., at least 1.5-fold, at least two-fold, at least three-fold, at least four-fold, at least five-fold, at least six-fold, at least seven-fold, at least eight-fold, at least nine-fold, at least ten-fold or more) in the first translational profile as to the second translational profile. In some embodiments, less than 20% of the genes in the genome are differentially translated by at least 1.5-fold or at least two-fold in the first translational profile as compared to the second translational profile. In some embodiments, less than 5% of the genes in the genome are differentially translated by at least 1.5-fold, at least 2-fold, at least 3-fold, or at least 4-fold in the first translational profile as compared to the second translational profile. In some embodiments, less than 1% of the genes in the genome are differentially translated by at least 1.5-fold, at least 2-fold, at least 3-fold, at least 4-fold, or at least 5-fold in the first translational profile as compared to the second translational profile.

[0389] Drug candidate molecules or agents are not limited by therapeutic category, and can include, for example, analgesics, anti-inflammatory agents, antihelminthics, anti-arrhythmic agents, anti-bacterial agents, anti-viral agents, anti-coagulants, anti-depressants, anti-diabetics, anti-epileptics, anti-fungal agent, anti-gout agents, anti-hypertensive agents, anti-malarials, anti-migraine agents, anti-muscarinic agents, anti-neoplastic agents, erectile dysfunction improvement agents, immunosuppressants, anti-protozoal agents, anti-thyroid agents, anxiolytic agents, sedatives, hypnotics, neuroleptics, β-blockers, cardiac inotropic agents, corticosteroids, diuretics, anti-parkinsonian agents, gastro-intestinal agents, histamine receptor antagonists, keratolytics, lipid regulating agents, anti-anginal agents, Cox-2 inhibitors, leukotriene inhibitors, macrolides, muscle relaxants, anti-osteoporosis agents, anti-obesity agents, cognition enhancers, anti-urinary incontinence agents, nutritional oils, anti-benign prostate hypertrophy agents, essential fatty acids, non-essential fatty acids, and the like, as well as mixtures thereof.

[0390] In some embodiments, the method further comprises comparing the translational profile for the contacted biological sample with a control translational profile for a second biological sample that has been contacted with a known active compound or therapeutic agent. For example, an active compound or therapeutic agent may be known as useful for treating a cancer, a fibrotic disorder, a neurodegenerative disease or disorder, a neurocognitive or neurodevelopmental disorder, an inflammatory disease or disorder, an autoimmune disease or disorder, a viral infection, or the like. In some cases, a candidate agent may mimic the action of an active compound or therapeutic agent known to have a particular function or induce a particular biological effect or phenotypic change in a cell or a subject. In certain embodiments, a candidate agent is identified as a mimic of a known active compound or therapeutic agent by causing a shift in the translational profile to be comparable or similar to the translational profile induced by the known active compound or therapeutic agent. In some embodiments, the known therapeutic agent is a known inhibitor of an oncogenic pathway. In some embodiments, the known therapeutic agent is a known inhibitor of the mammalian target of rapamycin (mTOR) pathway, the PI3K pathway, the AKT pathway, the Ras pathway, the Myc pathway, the Wnt pathway, or the BRAF pathway. In some embodiments, the known therapeutic agent is a known inhibitor of the mTOR pathway.

[0391] In some embodiments, a method for identifying a drug candidate molecule or agent useful for treating a disease (e.g., an inflammatory disease, an autoimmune disease, a fibrotic disorder, a neurodegenerative disease, a neurodevelopmental disease, a metabolic disease, a viral infection, a cardiomyopathy or a cancer), comprises:
[0392] (a) determining a first translational profile for a plurality of genes from a disease sample contacted with a candidate agent;
[0393] (b) determining a second translational profile for a plurality of genes from a control disease sample contacted with a known active compound; and
[0394] (c) identifying the agent as a candidate therapeutic for use in treating a disease (e.g., an inflammatory disease, an autoimmune disease, a fibrotic disorder, a neurodegenerative disease, a neurodevelopmental disease, a metabolic disease, a viral infection, a cardiomyopathy or a cancer, respectively) when one or more genes are differentially translated in the first translational profile as compared to the second translational profile and when the differential translation results in a biological benefit.

[0395] In some embodiments, a method for identifying a drug candidate molecule or agent useful for treating a disease (e.g., an inflammatory disease, an autoimmune disease, a fibrotic disorder, a neurodegenerative disease, a neurodevelopmental disease, a metabolic disease, a viral infection, a cardiomyopathy or a cancer), comprises:
[0396] (a) determining a first translational profile for a plurality of genes from a disease sample contacted with a candidate agent;
[0397] (b) determining a second translational profile for a plurality of genes from a control disease sample, respectively, contacted with a known active compound; and
[0398] (c) identifying the agent as a candidate therapeutic for use in treating a disease (e.g., an inflammatory disease, an autoimmune disease, a fibrotic disorder, a neurodegenerative disease, a neurodevelopmental disease, a metabolic disease, a viral infection, a cardiomyopathy or a cancer, respectively), when the first translational profile is comparable to the second translational profile.

[0399] In still more embodiments, a method for identifying a drug candidate molecule or agent useful for treating a disease (e.g., an inflammatory disease, an autoimmune disease, a fibrotic disorder, a neurodegenerative disease, a neurodevelopmental disease, a metabolic disease, a viral infection, a cardiomyopathy or a cancer), comprises:
[0400] (a) determining three independent translational profiles, each for a plurality of genes from a disease sample, wherein (i) a first translational profile is from the sample not contacted with any compound, (ii) a second translational profile is from the sample contacted with a known active compound, and (iii) a third translational profile is from the sample contacted with a candidate agent;
[0401] (b) identifying one or more genes as differentially translated in the first translational profile as compared to the second translational profile; and
[0402] (c) identifying the agent as a candidate therapeutic for use in treating a disease (e.g., an inflammatory disease, an autoimmune disease, a fibrotic disorder, a neurodegenerative disease, a neurodevelopmental disease, a metabolic disease, a viral infection, a cardiomyopathy or a cancer, respectively) when the one or more differentially translated genes from step (b) are in the third translational profile and have a translational profile closer to the translational profile of the one or more genes in the second translational profile than to the translational profile of the one or more genes in the first translational profile.

[0403] In further embodiments, a method for identifying a drug candidate molecule or agent useful for treating a disease (e.g., a cancer, an inflammatory disease, an autoimmune disease, a fibrotic disorder, a neurodegenerative disease, a neurodevelopmental disease, a metabolic disease, a viral infection, or a cardiomyopathy), comprises:
[0404] (a) determining three independent translational profiles, each for a plurality of genes from a disease sample, wherein (i) a first translational profile is from the sample not contacted with any compound, (ii) a second translational profile is from the sample contacted with a known active compound, and (iii) a third translational profile is from the sample contacted with a candidate agent;
[0405] (b) determining a first differential translational profile comprising one or more genes differentially translated in the first translational profile as compared to the second translational profile, and determining a second differential translational profile comprising one or more genes differentially translated in the first translational profile as compared to the third translational profile; and
[0406] (c) identifying the agent as a candidate therapeutic for use in treating a disease (e.g., a cancer, an inflammatory disease, an autoimmune disease, a fibrotic disorder, a neurodegenerative disease, a neurodevelopmental disease, a metabolic disease, a viral infection, or a cardiomyopathy, respectively) when the first differential translational profile is comparable to the second differential translational profile.

[0407] In some embodiments, the differentially translated genes comprise one or more biological pathways, such as at least two or at least three biological pathways. In certain embodiments, the one or more differentially translated genes comprise a plurality of genes and optionally the plurality of differentially translated genes may comprise one or more gene signatures. In further embodiments, the one or more genes are differentially translated at least a two-fold or more. In still further embodiments, each translational profile comprises at least 100 genes, at least 200 genes, at least 300 genes, at least 400 genes, at least 500 genes, or each translational profile comprises a genome-wide translational profile. For example, less than about 25%, about 20%, about 15%, about 10%, about 5%, about 4%, about 3%, about 2% or about 1% of the genes in the genome are differentially translated in a translational profile from a disease sample treated with a drug candidate molecule or agent as compared to a translational profile of an untreated disease sample.

[0408] In some embodiments, the known active compound is for use in treating an inflammatory disease, autoimmune disease, fibrotic disorder, neurodegenerative disease, neurodevelopmental disease, metabolic disease, viral infection, cardiomyopathy or cancer. In some embodiments, the known active compound is a therapeutic for use in treating a cancer selected from prostate cancer, breast cancer, bladder cancer, lung cancer, renal cell carcinoma, endometrial cancer, melanoma, ovarian cancer, thyroid cancer, or brain cancer. In some embodiments, the known active compound is a therapeutic for use in treating an inflammatory disease selected from ankylosing spondylitis, atherosclerosis, multiple sclerosis, systemic lupus erythematosus (SLE), psoriasis, psoriatic arthritis, rheumatoid arthritis, ulcerative colitis, inflammatory bowel disease, or Crohn's disease. In some embodiments, the known active compound is a therapeutic for use in treating a fibrotic disorder selected from pulmonary fibrosis, idiopathic pulmonary fibrosis, cystic fibrosis, liver fibrosis, cardiac fibrosis, endomyocardial fibrosis, atrial fibrosis, mediastinal fibrosis, myelofibrosis, retroperitoneal fibrosis, chronic kidney disease, nephrogenic systemic fibrosis, Crohn's disease, hypertrophic scarring, keloid, scleroderma, organ transplant associated fibrosis, or ischemia associated fibrosis. In some embodiments, the known active compound is a therapeutic for use in treating a neurodegenerative disease selected from Parkinson's disease, Alzheimer's disease, Amyotrophic Lateral Sclerosis, Creutzfeldt-Jakob disease, Huntington's disease, Lewy body dementia, frontotemporal dementia, corticobasal degeneration, primary progressive aphasia or progressive supranuclear palsy. In some embodiments, the known active compound is a therapeutic for use in treating a neurodevelopmental disease selected from autism, autism spectrum disorders, Fragile X Syndrome, attention deficit disorder, or a pervasive development disorder. In some embodiments, the known active compound is a therapeutic for use in treating a viral infection selected from adenovirus, bunyavirus, herpesvirus, papovavirus, paramyxovirus, picornavirus, rhabdovirus, orthomyxovirus, poxvirus, reovirus, retrovirus, lentivirus, or flavivirus.

[0409] In some embodiments, the translational profiles comprise one or more gene signatures, wherein one or more gene signatures are comparable in the first and second translational profiles. In certain embodiments, the first and second translational profiles are comparable when an amount of protein translated from one or more differentially translated genes in the first and second translational profiles differs by no more than about 25%, 20%, 15%, 10%, 5%, 1% or less. In further embodiments, the one or more differentially translated genes from the third translational profile have a translational profile closer to the translational profile of the one or more genes in the second translational profile when the amount of protein translated from the one or more differentially translated genes in the third and second translational profiles differs by no more than about 25%, 20%, 15%, 10%, 5%, 1% or less.

[0410] In some embodiments, the methods of identifying a drug candidate molecule as described herein are used to compare a group of drug candidate molecules and select one drug candidate molecule or a smaller subgroup of drug candidate molecules from this group. In some embodiments, the methods described herein are used to compare drug candidate molecules and select one candidate molecule or a subgroup of drug candidate molecules which alter the translation of a relatively smaller number of proteins, as compared to the number of proteins for which translational is altered for the larger group of drug candidate molecules. In some embodiments, the methods described herein are used to compare drug candidate molecules and select one candidate molecule or a subgroup of drug candidate molecules for which altered translation resides in a relatively smaller number of pathways, as compared to the number of pathways for which translation is altered for the larger group of drug candidate molecules. In some embodiments, the methods described herein are used to compare drug candidate molecules and select one candidate molecule or a subgroup of drug candidate molecules which alter the translation of several proteins within one specific pathway, as compared to the larger group of drug candidate molecules for which a smaller number of proteins within that one specific pathway have altered translation.

### VII. Therapeutic Methods

[0411] In yet another aspect, the present invention provides therapeutic methods for identifying subjects for treatment and treating subjects in need thereof. In some embodiments, the present invention relates to methods of identifying a subject as a candidate for treatment, e.g., for treatment with an mTOR inhibitor. In some embodiments, the present invention relates to methods of treating a subject, e.g., a subject having a cancer, an inflammatory disease, an autoimmune disease, a fibrotic disorder, a neurodegenerative disease, a neurodevelopmental disease, a metabolic disease, or a viral infection.

[0412] A. Identifying Subjects for Treatment

[0413] In some embodiments, the present invention relates to a method of identifying a subject as a candidate for treatment with an mTOR inhibitor. In some embodiments, the method comprises:
[0414] (a) determining a first translational profile in a sample from the subject, wherein the first translational profile comprises translational levels for one or more genes having a 5′ terminal oligopyrimidine tract (5′ TOP) and/or a pyrimidine-rich translational element (PRTE); and
[0415] (b) comparing the first translational profile to a second translational profile comprising translational levels for the one or more genes, wherein the second translational profile is from a control sample, wherein the control sample is from a known responder to the mTOR inhibitor prior to administration of the mTOR inhibitor to the known responder;
[0416] wherein a translational level of the one or more genes in the first translational profile that is at least as high as the translational level of the one or more genes in the second translational profile identifies the subject as a candidate for treatment with the mTOR inhibitor.

[0417] In some embodiments, the one or more genes (e.g., the 1, 2, 3, 4, 5, 6, 7, 8, 9, 10, 11, 12, 13, 14, 15, 16, 17, 18, 19, 20 or more genes) are selected from the genes listed in any of Table 1, Table 2, or Table 3.

[0418] In some embodiments, a method of identifying a subject as a candidate for treatment with an mTOR inhibitor comprises:
[0419] (a) determining a first translational profile in a sample from the subject, wherein the first translational profile comprises translational levels for one or more genes selected from the group consisting of SEQ ID NOs:1-144; and
[0420] (b) comparing the first translational profile to a second translational profile comprising translational levels for the one or more genes, wherein the second translational profile is from a control sample, wherein the control sample is from a known responder to the mTOR inhibitor prior to administration of the mTOR inhibitor to the known responder;
[0421] wherein a translational level of the one or more genes in the first translational profile that is at least as high as the translational level of the one or more genes in the second translational profile identifies the subject as a candidate for treatment with the mTOR inhibitor.

[0422] In some embodiments, the one or more genes (e.g., the 1, 2, 3, 4, 5, 6, 7, 8, 9, 10, 11, 12, 13, 14, 15, 16, 17, 18, 19, 20 or more genes) are cell invasion/metastasis genes. In some embodiments, the one or more genes are selected from YB1, vimentin, MTA1, and CD44.

[0423] In some embodiments, a method of identifying a subject as a candidate for treatment with an mTOR inhibitor comprises:
[0424] (a) determining a first translational profile in a sample from the subject, wherein the first translational profile comprises translational levels for one or more genes of a biological pathway, wherein the biological pathway is selected from a protein synthesis pathway, a cell invasion/metastasis pathway, a cell division pathway, an apoptosis pathway, a signal transduction pathway, a cellular transport pathway, a post-translational protein modification pathway, a DNA repair pathway, and a DNA methylation pathway; and
[0425] (b) comparing the first translational profile to a second translational profile comprising translational levels for the one or more genes, wherein the second translational profile is from a control sample, wherein the control sample is from a known responder to the mTOR inhibitor prior to administration of the mTOR inhibitor to the known responder;
[0426] wherein a translational level of the one or more genes in the first translational profile that is at least as high as the translational level of the one or more genes in the second translational profile identifies the subject as a candidate for treatment with the mTOR inhibitor.

[0427] In some embodiments, the methods of the present invention relate to a method of identifying a subject as a candidate for treatment with a therapeutic agent. In some embodiments, the method comprises:
[0428] (a) determining a first translational profile in a sample from the subject, wherein the translational profile comprises translational levels for one or more genes of a biological pathway, wherein the biological pathway is selected from a protein synthesis pathway, a cell invasion/metastasis pathway, a cell division pathway, an apoptosis pathway, a signal transduction pathway, a cellular transport pathway, a post-translational protein modification pathway, a DNA repair pathway, and a DNA methylation pathway; and
[0429] (b) comparing the first translational profile to a second translational profile comprising translational levels for the one or more genes, wherein the second translational profile is from a control sample, wherein the control sample is from a known responder to the therapeutic agent prior to administration of the therapeutic agent to the known responder;
[0430] wherein a translational level of the one or more genes that is at least as high as the translational level of the one or more genes in the second translational profile identifies the subject as a candidate for treatment with the therapeutic agent.

[0431] In further embodiments, a method for identifying a subject as a candidate for treating a disease (e.g., a cancer, an inflammatory disease, an autoimmune disease, a fibrotic disorder, a neurodegenerative disease, a neurodevelopmental disease, a metabolic disease, a viral infection, or a cardiomyopathy), comprises:
[0432] (a) determining a first translational profile for a plurality of genes in a sample from a subject having or suspected of having a disease;
[0433] (b) determining a second translational profile for a plurality of genes in a control disease sample, wherein the control sample is from a subject known to respond to the therapeutic agent and the sample has not been contacted with a therapeutic agent for a disease; and
[0434] (c) identifying the subject as a candidate for treating a disease (e.g., a cancer, an inflammatory disease, an autoimmune disease, a fibrotic disorder, a neurodegenerative disease, a neurodevelopmental disease, a metabolic disease, a viral infection, or a cardiomyopathy) (e.g., a cancer, an inflammatory disease, an autoimmune disease, a fibrotic disorder, a neurodegenerative disease, a neurodevelopmental disease, a metabolic disease, a viral infection, or a cardiomyopathy, respectively) with a therapeutic agent when the first translational profile is comparable to the second translational profile.

[0435] In some embodiments, the translational profiles comprise one or more gene signatures, wherein one or more gene signatures are comparable in the first and second translational profiles. In certain embodiments, the first and second translational profiles are comparable when an amount of protein translated from one or more differentially translated genes in the first and second translational profiles differs by no more than about 25%, 20%, 15%, 10%, 5%, 1% or less.

[0436] In some embodiments, translational levels are compared for the first translational profile and the second translational profile for 1, 2, 3, 4, 5, 6, 7, 8, 9, 10, 11, 12, 13, 14, 15, 16, 17, 18, 19, 20 or more genes in one or more biological pathways. In some embodiments, the translational level of one or more genes from each of at least two of the biological pathways is at least as high in the first translational profile as compared to the second translational profile. In some embodiments, the translational level of one or more genes from each of at least three of the biological pathways is at least as high in the first translational profile as compared to the second translational profile.

[0437] In some embodiments, the first and/or second translational profiles comprise translational levels for at least 2, 3, 4, 5, 6, 7, 8, 9, 10, 11, 12, 13, 14, 15, 16, 17, 18, 19, 20, 25, 30, 35, 40, 45, 50, 60, 70, 80, 90, 100, 150, 200, 250, 300, 350, 400, 450, 500, 550, 600, 650, 700, 750, 800, 850, 900, 950, 1000, 1500, 2000, 2500, 3000, 3500, 4000, 4500, 5000, 5500, 6000, 6500, 7000, 7500, 8000, 8500, 9000, 9500, 10,000 genes or more in the biological sample. In some embodiments, the first and/or second translational profile comprises translational levels for at least about 1%, 2%, 3%, 4%, 5%, 6%, 7%, 8%, 9%, 10%, 11%, 12%, 13%, 14%, 15%, 16%, 17%, 18%, 19%, 20%, 25%, 30%, 35%, 40%, 45%, 50% or more of all genes in the biological sample. In some embodiments, the translational profiles comprise genome-wide measurements of gene translational levels. In some embodiments, the translational level of the one or more genes is increased by at least 1.5-fold or at least two-fold (e.g., at least 1.5-fold, at least two-fold, at least three-fold, at least four-fold, at least five-fold, at least six-fold, at least seven-fold, at least eight-fold, at least nine-fold, at least ten-fold or more) in the first translational profile as to the second translational profile. In some embodiments, the translational level of the one or more genes is decreased by at least 1.5-fold or at least two-fold (e.g., at least 1.5-fold, at least two-fold, at least three-fold, at least four-fold, at least five-fold, at least six-fold, at least seven-fold, at least eight-fold, at least nine-fold, at least ten-fold or more) in the first translational profile as to the second translational profile.

[0438] In some embodiments, the disease is a cancer. Non-limiting examples of cancers that can be treated according to the methods of the present invention include, but are not limited to, anal carcinoma, bladder carcinoma, breast carcinoma, cervix carcinoma, chronic lymphocytic leukemia, chronic myelogenous leukemia, endometrial carcinoma, hairy cell leukemia, head and neck carcinoma, lung (small cell) carcinoma, multiple myeloma, non-Hodgkin's lymphoma, follicular lymphoma, ovarian carcinoma, brain tumors, colorectal carcinoma, hepatocellular carcinoma, Kaposi's sarcoma, lung (non-small cell carcinoma), melanoma, pancreatic carcinoma, prostate carcinoma, renal cell carcinoma, and soft tissue sarcoma.

[0439] In some embodiments, the disease is an inflammatory disease (e.g., an autoimmune disease, arthritis, or MS). In some embodiments, the disease is a fibrotic disorder (e.g., pulmonary fibrosis, idiopathic pulmonary fibrosis, cystic fibrosis, liver fibrosis, cardiac fibrosis, mediastinal fibrosis, myelofibrosis, keloids, scleroderma, organ transplant associated fibrosis, or ischemia associated fibrosis). In some embodiments, the disease is a neurodegenerative disease (e.g., Parkinson's disease, Amyotrophic Lateral Sclerosis (ALS), Creutzfeldt-Jakob disease, Huntington's disease, Lewy body dementia, frontotemporal dementia, corticobasal degeneration, primary progressive aphasia, progressive supranuclear palsy or Alzheimer's disease). In some embodiments, the disease is a neurodevelopmental disease (e.g., autism, autism spectrum disorders, Fragile X Syndrome, attention deficit disorder, pervasive development disorders). In some embodiments, the disease is a metabolic disease (e.g., diabetes, metabolic syndrome, or a cardiovascular disease). In some embodiments, the disease is a viral infection (e.g., adenovirus, herpesvirus, papovavirus, poxvirus, retrovirus, lentivirus, or flavivirus). In some embodiments, the disease is a cardiomyopathy.

[0440] In some embodiments, a disease is associated with one or more altered biological pathways. In some embodiments, wherein a cell communication pathway is altered, the disease is an immune or inflammatory disease, a fibrotic disorder, a neurodegenerative disease, a neurodevelopment disease, a cancer, a metabolic disorder, or a viral disease. In some embodiments, wherein a cell communication pathway is altered, the disease is an immune or inflammatory disease (e.g., an autoimmune disease, arthritis, or MS).

[0441] In some embodiments, wherein a cellular process pathway is altered, the disease is an immune or inflammatory disease (e.g., an autoimmune disease, arthritis, or MS), a fibrotic disorder, a neurodegenerative disease (e.g., Parkinson's disease, Amyotrophic Lateral Sclerosis (ALS), Creutzfeldt-Jakob disease, Huntington's disease, Lewy body dementia, frontotemporal dementia, corticobasal degeneration, primary progressive aphasia, progressive supranuclear palsy, or Alzheimer's disease), a neurodevelopmental disease (e.g., autism, autism spectrum disorders, Fragile X Syndrome, attention deficit disorder, pervasive development disorders), a cancer, a metabolic disorder, or a viral disease.

[0442] In some embodiments, wherein an immune system process pathway is altered, the disease is an immune or inflammatory disease, a fibrotic disorder, a neurodegenerative disease, a neurodevelopmental disease, a cancer, a metabolic disorder, or a viral disease. In some embodiments, wherein an immune system process pathway is altered, the disease is an immune or inflammatory disease (e.g., an autoimmune disease, arthritis, or MS).

[0443] In some embodiments, wherein a response to stimulus pathway is altered, the disease is an immune or inflammatory disease, a fibrotic disorder, a neurodegenerative disease, a neurodevelopmental disease, a metabolic disorder, or a viral disease. In some embodiments, wherein a response to stimulus pathway is altered, the disease is an immune or inflammatory disease (e.g., an autoimmune disease, arthritis, or MS) or a viral disease.

[0444] In some embodiments, wherein a transport pathway is altered, the disease is an immune or inflammatory disease, a fibrotic disorder, a neurodegenerative disease, or a metabolic disorder. In some embodiments, wherein a transport pathway is altered, the disease is an immune or inflammatory disease (e.g., an autoimmune disease, arthritis, or MS) or a metabolic disorder (e.g., diabetes, metabolic syndrome, or a cardiovascular disease).

[0445] In some embodiments, wherein a metabolic process pathway is altered, the disease is a fibrotic disorder, a neurodegenerative disease, a neurodevelopmental disease, a cancer, or a metabolic disorder. In some embodiments, wherein a metabolic process pathway is altered, the disease is a metabolic disorder (e.g., diabetes, metabolic syndrome, or a cardiovascular disease).

[0446] In some embodiments, a metabolic process pathway is a carbohydrate metabolic process pathway, a lipid metabolic process pathway, a nucleobase, nucleoside, or nucleotide pathway, or a protein metabolic process pathway (e.g., a proteolysis pathway, a protein complex assembly pathway, a protein folding pathway, a protein modification process pathway, or a translation pathway). In some embodiments, wherein a carbohydrate metabolic process pathway is altered, the disease is a fibrotic disorder, a neurodegenerative disease, or a metabolic disorder. In some embodiments, wherein a lipid metabolic process pathway is altered, the disease is an immune or inflammatory disease, a fibrotic disorder, a neurodegenerative disease, or a metabolic disorder. In some embodiments, wherein a nucleobase, nucleoside, or nucleotide pathway is altered, the disease is a cancer or a viral disease. In some embodiments, wherein a protein metabolic process pathway is altered, the disease is an immune or inflammatory disease, a fibrotic disorder, a neurodegenerative disease, a neurodevelopmental disease, a cancer, a metabolic disorder, or a viral disease. In some embodiments, wherein a proteolysis process pathway is altered, the disease is an immune or inflammatory disease, a fibrotic disorder, a neurodegenerative disease, a neurodevelopmental disease, a cancer, or a metabolic disorder. In some embodiments, wherein a protein complex assembly pathway is altered, the disease is a metabolic disorder. In some embodiments, wherein a protein folding pathway is altered, the disease is a neurodegenerative disease. In some embodiments, wherein a protein modification process pathway is altered, the disease is an immune or inflammatory disease, a fibrotic disorder, a neurodevelopmental disease, a neurodegenerative disease, a cancer, a metabolic disorder, or a viral disease. In some embodiments, wherein a protein translation pathway is altered, the disease is an immune or inflammatory disease, a fibrotic disorder, a neurodegenerative disease, a neurodevelopmental disease, or a cancer.

[0447] In some embodiments, the method further comprises administering a therapeutic agent to the identified subject. In some embodiments, the method further comprises administering an mTOR inhibitor to the identified subject.

[0448] B. Administration of Therapeutic Agents

[0449] In some embodiments, the present invention relates to a method of treating a subject having a cancer. In some embodiments, the method comprises:
[0450] administering an mTOR inhibitor to a subject that has been selected as having a first translational profile comprising a translational level of one or more genes that is at least as high as the translational level of the one or more genes in a second translational profile from a control sample;
[0451] wherein the first and second translational profiles comprise translational levels for one or more genes having a 5′ terminal oligopyrimidine tract (5′ TOP) and/or a pyrimidine-rich translational element (PRTE); and wherein the control sample is from a known responder to the mTOR inhibitor prior to administration of the mTOR inhibitor to the known responder;
[0452] thereby treating the cancer in the subject.

[0453] In some embodiments, the method of treating a subject having a cancer comprises:
[0454] administering an mTOR inhibitor to a subject that has been selected as having a first translational profile comprising a translational level of one or more genes that is at least as high as the translational level of the one or more genes in a second translational profile from a control sample;
[0455] wherein the first and second translational profiles comprise translational levels for one or more genes selected from the group consisting of SEQ ID NOs:1-144; and wherein the control sample is from a known responder to the mTOR inhibitor prior to administration of the mTOR inhibitor to the known responder;
[0456] thereby treating the cancer in the subject.

[0457] In some embodiments, the method of treating a subject having a cancer comprises:
[0458] administering an mTOR inhibitor to a subject that has been selected as having a first translational profile comprising a translational level of one or more genes that is at least as high as the translational level of the one or more genes in a second translational profile from a control sample;
[0459] wherein the first and second translational profiles comprise translational levels for one or more genes of a biological pathway selected from a protein synthesis pathway, a cell invasion/metastasis pathway, a cell division pathway, an apoptosis pathway, a signal transduction pathway, a cellular transport pathway, a post-translational protein modification pathway, a DNA repair pathway, and a DNA methylation pathway; and wherein the control sample is from a known responder to the mTOR inhibitor prior to administration of the mTOR inhibitor to the known responder;
[0460] thereby treating the cancer in the subject.

[0461] In some embodiments, the present invention relates to a method of treating a subject in need thereof. In some embodiments, the method comprises:
[0462] administering a therapeutic agent to a subject that has been selected as having a first translational profile comprising a translational level of one or more genes that is at least as high as the translational level of the one or more genes in a second translational profile;
[0463] wherein the first and second translational profiles comprise translational levels for one or more genes of a biological pathway selected from a protein synthesis pathway, a cell invasion/metastasis pathway, a cell division pathway, an apoptosis pathway, a signal transduction pathway, a cellular transport pathway, a post-translational protein modification pathway, a DNA repair pathway, and a DNA methylation pathway; and wherein the control sample is from a known responder to the therapeutic agent prior to administration of the therapeutic agent to the known responder;
[0464] thereby treating the subject.

[0465] In certain embodiments, a method for treating a disease (e.g., a cancer, an inflammatory disease, an autoimmune disease, a fibrotic disorder, a neurodegenerative disease, a neurodevelopmental disease, a metabolic disease, a viral infection, or a cardiomyopathy), comprises administering to a subject identified by:
[0466] (a) determining a first translational profile for a plurality of genes in a sample from a subject having or suspected of having a disease;
[0467] (b) determining a second translational profile for a plurality of genes in a control disease sample, wherein the control sample is from a subject known to respond to the therapeutic agent and the sample has not been contacted with a therapeutic agent for a disease; and
[0468] (c) identifying the subject as a candidate for treating a disease (e.g., a cancer, an inflammatory disease, an autoimmune disease, a fibrotic disorder, a neurodegenerative disease, a neurodevelopmental disease, a metabolic disease, a viral infection, or a cardiomyopathy, respectively) with a therapeutic agent when the first translational profile is comparable to the second translational profile;
[0469] thereby treating the subject.

[0470] In further embodiments, a method for treating a cancer, an inflammatory disease, an autoimmune disease, a fibrotic disorder, a neurodegenerative disease, a neurodevelopmental disease, a metabolic disease, a viral infection, or cardiomyopathy, comprises administering to a subject having a disease an agent or drug candidate molecule identified according to any one of the methods provided herein, thereby treating the subject.

[0471] In still further embodiments, a method for treating a cancer, an inflammatory disease, an autoimmune disease, a fibrotic disorder, a neurodegenerative disease, a neurodevelopmental disease, a metabolic disease, a viral infection, or a cardiomyopathy, comprises administering to a subject having a disease an agent that modulates a target, wherein the target was validated according to any one of the methods provided herein, thereby treating the subject.

[0472] In yet further embodiments, a method for treating a cancer, an inflammatory disease, an autoimmune disease, a fibrotic disorder, a neurodegenerative disease, a neurodevelopmental disease, a metabolic disease, a viral infection, or cardiomyopathy, by normalizing the disease translational profile, comprises administering to a subject having a disease an agent that modulates a target, wherein the target was validated according to any one of the methods provided herein, thereby treating the subject.

[0473] In any of the aforementioned embodiments for treating a cancer, an inflammatory disease, an autoimmune disease, a fibrotic disorder, a neurodegenerative disease, a neurodevelopmental disease, a metabolic disease, a viral infection, or cardiomyopathy according to a validated target, the target that was validated was suspected of being associated with a disease, was indirectly associated with a disease, or was associated with a disease (e.g., an inflammatory disease, an autoimmune disease, a fibrotic disorder, a neurodegenerative disease, a neurodevelopmental disease, a metabolic disease, a viral infection, a cardiomyopathy or a cancer, respectively).

[0474] In some embodiments, the translational profiles comprise one or more gene signatures, wherein one or more gene signatures are comparable in the first and second translational profiles. In certain embodiments, the first and second translational profiles are comparable when an amount of protein translated from one or more differentially translated genes in the first and second translational profiles differs by no more than about 50%, 45%, 40%, 35%, 30%, 25%, 20%, 15%, 10%, 5%, 1% or less. In further embodiments, the one or more differentially translated genes from the third translational profile have a translational profile closer to the translational profile of the one or more genes in the second translational profile when the amount of protein translated from the one or more differentially translated genes in the third and second translational profiles differs by no more than about 50%, 45%, 40%, 35%, 30%, 25%, 20%, 15%, 10%, 5%, 1% or less.

[0475] A subject is selected for therapeutic treatment based on any of the translational profiling methods as described herein. In some embodiments, the subject has a disease. In some embodiments, the disease is an inflammatory disease. In some embodiments, the disease is a fibrotic disorder. In some embodiments, the disease is a neurodegenerative disease. In some embodiments, the disease is a neurodevelopmental disease. In some embodiments, the disease is a metabolic disease. In some embodiments, the disease is viral infection. In some embodiments, the disease is a cardiomyopathy. In some embodiments, the disease is cancer.

[0476] Non-limiting examples of cancers that can be treated according to the methods of the present invention include, but are not limited to, anal carcinoma, bladder carcinoma, breast carcinoma, cervix carcinoma, chronic lymphocytic leukemia, chronic myelogenous leukemia, endometrial carcinoma, hairy cell leukemia, head and neck carcinoma, lung (small cell) carcinoma, multiple myeloma, non-Hodgkin's lymphoma, follicular lymphoma, ovarian carcinoma, brain tumors, colorectal carcinoma, hepatocellular carcinoma, Kaposi's sarcoma, lung (non-small cell carcinoma), melanoma, pancreatic carcinoma, prostate carcinoma, renal cell carcinoma, and soft tissue sarcoma. In some embodiments, the cancer is prostate cancer, breast cancer, bladder cancer, lung cancer, renal cell carcinoma, endometrial cancer, melanoma, ovarian cancer, thyroid cancer, or brain cancer. In some embodiments, the cancer is an invasive cancer.

[0477] Non-limiting examples of inflammatory and autoimmune diseases that can be treated according to the methods of the present disclosure include, but are not limited to, arthritis, rheumatoid arthritis, juvenile rheumatoid arthritis, osteoarthritis, polychondritis, psoriatic arthritis, psoriasis, dermatitis, polymyositis/dermatomyositis, inclusion body myositis, inflammatory myositis, toxic epidermal necrolysis, systemic scleroderma and sclerosis, CREST syndrome, inflammatory bowel disease, Crohn's disease, ulcerative colitis, respiratory distress syndrome, adult respiratory distress syndrome (ARDS), chronic obstructive pulmonary disease, meningitis, encephalitis, uveitis, colitis, glomerulonephritis, allergic conditions, eczema, asthma, conditions involving infiltration of T cells and chronic inflammatory responses, atherosclerosis, autoimmune myocarditis, leukocyte adhesion deficiency, systemic lupus erythematosus (SLE), subacute cutaneous lupus erythematosus, discoid lupus, lupus myelitis, lupus cerebritis, juvenile onset diabetes, multiple sclerosis (MS), allergic encephalomyelitis, neuromyelitis optica, rheumatic fever, Sydenham's chorea, immune responses associated with acute and delayed hypersensitivity mediated by cytokines and T-lymphocytes, tuberculosis, sarcoidosis, granulomatosis including Wegener's granulomatosis and Churg-Strauss disease, agranulocytosis, vasculitis (including hypersensitivity vasculitis/angiitis, ANCA and rheumatoid vasculitis), aplastic anemia, Diamond Blackfan anemia, immune hemolytic anemia including autoimmune hemolytic anemia (AIHA), pernicious anemia, pure red cell aplasia (PRCA), Factor VIII deficiency, hemophilia A, autoimmune neutropenia, pancytopenia, leukopenia, diseases involving leukocyte diapedesis, central nervous system (CNS) inflammatory disorders, multiple organ injury syndrome, myasthenia gravis, antigen-antibody complex mediated diseases, anti-glomerular basement membrane disease, anti-phospholipid antibody syndrome, allergic neuritis, Behcet disease, Castleman's syndrome, Goodpasture's syndrome, Lambert-Eaton Myasthenic Syndrome, Reynaud's syndrome, Sjorgen's syndrome, Stevens-Johnson syndrome, solid organ transplant rejection, graft-versus-host disease (GVHD), bullous pemphigoid, pemphigus, autoimmune polyendocrinopathies, seronegative spondyloarthropathies, Reiter's disease, stiff-man syndrome, giant cell arteritis, immune complex nephritis, IgA nephropathy, IgM polyneuropathies or IgM mediated neuropathy, idiopathic thrombocytopenic purpura (ITP), thrombotic throbocytopenic purpura (TTP), Henoch-Schonlein purpura, autoimmune thrombocytopenia, autoimmune disease of the testis and ovary including autoimmune orchitis and oophoritis, primary hypothyroidism; autoimmune endocrine diseases including autoimmune thyroiditis, chronic thyroiditis (Hashimoto's Thyroiditis), subacute thyroiditis, idiopathic hypothyroidism, Addison's disease, Grave's disease, autoimmune polyglandular syndromes (or polyglandular endocrinopathy syndromes), Type I diabetes (also referred to as insulin-dependent diabetes mellitus or IDDM); autoimmune hepatitis, lymphoid interstitial pneumonitis (HIV), bronchiolitis obliterans (non-transplant), non-specific interstitial pneumonia (NSIP), Guillain-BarréSyndrome, large vessel vasculitis (including polymyalgia rheumatica and giant cell (Takayasu's) arteritis), medium vessel vasculitis (including Kawasaki's disease and polyarteritis nodosa), polyarteritis nodosa (PAN), ankylosing spondylitis, Berger's disease (IgA nephropathy), rapidly progressive glomerulonephritis, primary biliary cirrhosis, Celiac sprue (gluten enteropathy), cryoglobulinemia, cryoglobulinemia associated with hepatitis, amyotrophic lateral sclerosis (ALS), coronary artery disease, familial Mediterranean fever, microscopic polyangiitis, Cogan's syndrome, Whiskott-Aldrich syndrome and thromboangiitis obliterans. In some embodiments, the inflammatory disease is ankylosing spondylitis, multiple sclerosis, systemic lupus erythematosus (SLE), rheumatoid arthritis, atherosclerosis, inflammatory bowel disease, or Crohn's disease.

[0478] Non-limiting examples of infectious viruses include adenovirus, bunyavirus (e.g., Hantavirus), herpesvirus, papovavirus, paramyxovirus, picornavirus, rhabdovirus (e.g., Rabies), orthomyxovirus (e.g., influenza), poxvirus (e.g., Vaccinia), reovirus, retrovirus, lentivirus (e.g., HIV), flavivirus (e.g., HCV), or the like).

[0479] The term “fibrotic disorder” or “fibrotic disease” refers to a medical condition featuring progressive and/or irreversible fibrosis, wherein excessive deposition of extracellular matrix occurs in and around inflamed or damaged tissue. Excessive and persistent fibrosis can progressively remodel and destroy normal tissue, which may lead to dysfunction and failure of affected organs, and ultimately death. A fibrotic disorder may affect any tissue in the body and is generally initiated by an injury. It is to be understood that fibrosis alone triggered by normal wound healing processes that has not progressed to a pathogenic state is not considered a fibrotic disorder or disease of this disclosure. A “fibrotic lesion” or “fibrotic plaque” refers to a focal area of fibrosis. As used herein, “injury” refers to an event that damages tissue and initiates fibrosis. An injury may be caused by an external factor, such as mechanical insult (e.g., cut, surgery), exposure to radiation, chemicals (e.g., chemotherapy, toxins, irritants, smoke), or infectious agent (e.g., bacteria, virus, or parasite). An injury may be caused by, for example, chronic autoimmune inflammation, allergic response, HLA mismatching (e.g., transplant recipients), or ischemia (i.e., an “ischemic event” or “ischemia” refers to an injury that restricts in blood supply to a tissue, resulting in damage to or dysfunction of tissue, which may be caused by problems with blood vessels, atherosclerosis, thrombosis or embolism, and may affect a variety of tissues and organs; an ischemic event may include, for example, a myocardial infarction, stroke, organ or tissue transplant, or renal artery stenosis). In certain embodiments, an injury leading to a fibrotic disorder may be of unknown etiology (i.e., idiopathic).

[0480] Non-limiting examples of fibrotic disorders or fibrotic diseases include pulmonary fibrosis, idiopathic pulmonary fibrosis, cystic fibrosis, liver fibrosis (e.g., cirrhosis), cardiac fibrosis, endomyocardial fibrosis, atrial fibrosis, mediastinal fibrosis, myelofibrosis, retroperitoneal fibrosis, progressive massive fibrosis (e.g., lungs), chronic kidney disease, nephrogenic systemic fibrosis, Crohn's disease, hypertrophic scarring, keloid, scleroderma, systemic sclerosis (e.g., skin, lungs), athrofibrosis (e.g., knee, shoulder, other joints), Peyronie's disease, Dupuytren's contracture, adhesive capsulitis, organ transplant associated fibrosis, ischemia associated fibrosis, or the like.

[0481] A therapeutic agent for use according to any of the methods of the present invention can be any composition that has or may have a pharmacological activity. Agents include compounds that are known drugs, compounds for which pharmacological activity has been identified but which are undergoing further therapeutic evaluation, and compounds that are members of collections and libraries that are screened for a pharmacological activity. In some embodiments, the therapeutic agent is an anti-cancer, e.g., an anti-signaling agent (e.g., a cytostatic drug) such as a monoclonal antibody or a tyrosine kinase inhibitor; an anti-proliferative agent; a chemotherapeutic agent (i.e., a cytotoxic drug); a hormonal therapeutic agent; and/or a radiotherapeutic agent.

[0482] Generally, the therapeutic agent is administered at a therapeutically effective amount or dose. A therapeutically effective amount or dose will vary according to several factors, including the chosen route of administration, the formulation of the composition, patient response, the severity of the condition, the subject's weight, and the judgment of the prescribing physician. The dosage can be increased or decreased over time, as required by an individual patient. In certain instances, a patient initially is given a low dose, which is then increased to an efficacious dosage tolerable to the patient. Determination of an effective amount is well within the capability of those skilled in the art.

[0483] The route of administration of a therapeutic agent can be oral, intraperitoneal, transdermal, subcutaneous, by intravenous or intramuscular injection, by inhalation, topical, intralesional, infusion; liposome-mediated delivery; topical, intrathecal, gingival pocket, rectal, intrabronchial, nasal, transmucosal, intestinal, ocular or otic delivery, or any other methods known in the art.

[0484] In some embodiments, a therapeutic agent is formulated as a pharmaceutical composition. In some embodiments, a pharmaceutical composition incorporates particulate forms, protective coatings, protease inhibitors, or permeation enhancers for various routes of administration, including parenteral, pulmonary, nasal and oral. The pharmaceutical compositions can be administered in a variety of unit dosage forms depending upon the method/mode of administration. Suitable unit dosage forms include, but are not limited to, powders, tablets, pills, capsules, lozenges, suppositories, patches, nasal sprays, injectibles, implantable sustained-release formulations, etc.

[0485] In some embodiments, a pharmaceutical composition comprises an acceptable carrier and/or excipients. A pharmaceutically acceptable carrier includes any solvents, dispersion media, or coatings that are physiologically compatible and that preferably does not interfere with or otherwise inhibit the activity of the therapeutic agent. Preferably, the carrier is suitable for intravenous, intramuscular, oral, intraperitoneal, transdermal, topical, or subcutaneous administration. Pharmaceutically acceptable carriers can contain one or more physiologically acceptable compound(s) that act, for example, to stabilize the composition or to increase or decrease the absorption of the active agent(s). Physiologically acceptable compounds can include, for example, carbohydrates, such as glucose, sucrose, or dextrans, antioxidants, such as ascorbic acid or glutathione, chelating agents, low molecular weight proteins, compositions that reduce the clearance or hydrolysis of the active agents, or excipients or other stabilizers and/or buffers. Other pharmaceutically acceptable carriers and their formulations are well-known and generally described in, for example, Remington: The Science and Practice of Pharmacy, 21st Edition, Philadelphia, Pa. Lippincott Williams & Wilkins, 2005. Various pharmaceutically acceptable excipients are well-known in the art and can be found in, for example, Handbook of Pharmaceutical Excipients (5^{th} ed., Ed. Rowe et al., Pharmaceutical Press, Washington, D.C.).

[0486] C. Normalizing Translational Profiles

[0487] In another aspect, the methods of the present invention relate to normalizing a translational profile in a subject. In some embodiments, the present invention provides a method of identifying an agent or therapeutic for normalizing a translational profile in a subject. In some embodiments, the present invention provides a method of validating a target for normalizing a translational profile associated with a disease. In some embodiments, the method comprises:
[0488] (a) determining a first translational profile for a first biological sample from the subject, wherein the first translational profile comprises translational levels for a plurality of genes;
[0489] (b) comparing the first translational profile to a second translational profile comprising translational levels for the plurality of genes, wherein the second translational profile is from a control sample, wherein the control sample is from a non-diseased subject;
[0490] (c) identifying one or more genes of a biological pathway as differentially translated in the first translational profile as compared to the second translational profile, wherein the biological pathway is selected from a protein synthesis pathway, a cell invasion/metastasis pathway, a cell division pathway, an apoptosis pathway, a signal transduction pathway, a cellular transport pathway, a post-translational protein modification pathway, a DNA repair pathway, and a DNA methylation pathway;
[0491] (d) contacting a second biological sample from the subject with the agent;
[0492] (e) determining a third translational profile for the second biological sample, wherein the third translational profile comprises translational levels for the one or more genes identified as differentially translated in the first translational profile as compared to the second translational profile; and
[0493] (f) comparing the translational levels for the one or more genes in the third translational profile to the translational levels for the one or more genes in the first and second translational profiles;
[0494] wherein a translational level for the one or more genes in the third translational profile that is closer to the translational level for the one or more genes in the second translational profile than to the translational level for the one or more genes in the first translational profile identifies the agent as an agent for normalizing the translational profile in the subject.

[0495] In some embodiments, the present invention provides a method of normalizing a translational profile in a subject. In some embodiments, the method comprises:
[0496] administering to the subject an agent that has been selected as an agent that normalizes the translational profile in the subject, wherein the agent is selected by:
   [0497] (a) determining a first translational profile for a first biological sample from the subject, wherein the first translational profile comprises translational levels for a plurality of genes;
   [0498] (b) comparing the first translational profile to a second translational profile comprising translational levels for the plurality of genes, wherein the second translational profile is from a control sample, wherein the control sample is from a non-diseased subject;
   [0499] (c) identifying one or more genes of a biological pathway as differentially translated in the first translational profile as compared to the second translational profile, wherein the biological pathway is selected from a protein synthesis pathway, a cell invasion/metastasis pathway, a cell division pathway, an apoptosis pathway, a signal transduction pathway, a cellular transport pathway, a post-translational protein modification pathway, a DNA repair pathway, and a DNA methylation pathway;
   [0500] (d) contacting a second biological sample form the subject with the agent;
   [0501] (e) determining a third translational profile for the second biological sample, wherein the third translational profile comprises translational levels for the one or more genes identified as differentially translated in the first translational profile as compared to the second translational profile; and
   [0502] (f) comparing the translational levels for the one or more genes in the third translational profile to the translational levels for the one or more genes in the first and second translational profiles; wherein a translational level for the one or more genes in the third translational profile that is closer to the translational level for the one or more genes in the second translational profile than to the translational level for the one or more genes in the first translational profile identifies the agent as an agent for normalizing the translational profile in the subject;
[0503] thereby normalizing the translational profile in the subject.

[0504] In certain embodiments, the present invention provides a method for identifying an agent or drug candidate molecule (i.e., a candidate therapeutic) for normalizing a translational profile associated with a disease (e.g., a cancer, an inflammatory disease, an autoimmune disease, a fibrotic disorder, a neurodegenerative disease, a neurodevelopmental disease, a metabolic disease, a viral infection, or a cardiomyopathy), comprising:
[0505] (a) determining a first translational profile for a plurality of genes from a disease sample contacted with an agent or drug candidate molecule;
[0506] (b) determining a second translational profile for a plurality of genes from (i) a control non-diseased sample or (ii) a control non-diseased sample contacted with the agent or drug candidate molecule; and
[0507] (c) identifying the agent or drug candidate molecule as useful for normalizing a translational profile associated with a disease (e.g., a cancer, an inflammatory disease, an autoimmune disease, a fibrotic disorder, a neurodegenerative disease, a neurodevelopmental disease, a metabolic disease, a viral infection, or a cardiomyopathy, respectively) when the first translational profile is comparable to the second translational profile.

[0508] In certain embodiments, the present invention provides a method for identifying an agent or drug candidate molecule (i.e., a candidate therapeutic) for normalizing a translational profile associated with a disease (e.g., a cancer, an inflammatory disease, an autoimmune disease, a fibrotic disorder, a neurodegenerative disease, a neurodevelopmental disease, a metabolic disease, a viral infection, or a cardiomyopathy), comprising:
[0509] (a) determining three independent translational profiles, each for a plurality of genes, wherein (i) a first translational profile is from a disease sample, (ii) a second translational profile is from (1) a control non-diseased sample or (2) a control non-diseased sample contacted with an agent or drug candidate molecule, and (iii) a third translational profile is from the disease sample contacted with the agent or drug candidate molecule;
[0510] (b) identifying one or more genes as differentially translated in the first translational profile as compared to the second translational profile; and
[0511] (c) identifying the agent as an agent or drug candidate molecule for normalizing a translational profile associated with a disease (e.g., a cancer, an inflammatory disease, an autoimmune disease, a fibrotic disorder, a neurodegenerative disease, a neurodevelopmental disease, a metabolic disease, a viral infection, or a cardiomyopathy, respectively) when the one or more differentially translated genes from step (b) are in the third translational profile and have a translational profile closer to the translational profile of the one or more genes in the second translational profile than to the translational profile of the one or more genes in the first translational profile.

[0512] In certain embodiments, the present invention provides a method for identifying an agent or drug candidate molecule (i.e., a candidate therapeutic agent) for normalizing a translational profile associated with a disease, comprising:
[0513] (a) determining three independent translational profiles, each for a plurality of genes, wherein (i) a first translational profile is from a disease sample, (ii) a second translational profile is from (1) a control non-diseased sample or (2) a control non-diseased sample contacted with an agent or drug candidate molecule, and (iii) a third translational profile is from the disease sample contacted with the agent or drug candidate molecule;
[0514] (b) determining a first differential translational profile comprising one or more genes differentially translated in the first translational profile as compared to the second translational profile, and determining a second differential translational profile comprising one or more genes differentially translated in the first translational profile as compared to the third translational profile; and
[0515] (c) identifying the agent as a candidate therapeutic for normalizing a translational profile associated with a disease when the first differential translational profile is comparable to the second differential translational profile.

[0516] In certain embodiments, the present invention provides a method for validating a target for normalizing a translational profile associated with a disease, comprising:
[0517] (a) determining a first translational profile for a plurality of genes from a disease sample contacted with an agent that modulates a target;
[0518] (b) determining a second translational profile for a plurality of genes from (i) a control non-diseased sample or (ii) a control non-diseased sample contacted with the agent that modulates a target; and
[0519] (c) validating the target as a target for normalizing a translational profile associated with a disease when the first translational profile is comparable to the second translational profile.

[0520] In certain embodiments, the present invention provides a method for validating a target for normalizing a translational profile associated with a disease, comprising:
[0521] (a) determining three independent translational profiles, each for a plurality of genes, wherein (i) a first translational profile is from a disease sample, (ii) a second translational profile is from (1) a control non-diseased sample or (2) a control non-diseased sample contacted with an agent that modulates a target, and (iii) a third translational profile is from the disease sample contacted with the agent that modulates a target;
[0522] (b) identifying one or more genes as differentially translated in the first translational profile as compared to the second translational profile; and
[0523] (c) validating the target as a target for normalizing a translational profile associated with a disease when the one or more differentially translated genes from step (b) are in the third translational profile and have a translational profile closer to the translational profile of the one or more genes in the second translational profile than to the translational profile of the one or more genes in the first translational profile.

[0524] In certain embodiments, the present invention provides a method for validating a target for normalizing a translational profile associated with a disease, comprising:
[0525] (a) determining three independent translational profiles, each for a plurality of genes, wherein (i) a first translational profile is from a disease sample, (ii) a second translational profile is from (1) a control non-diseased sample or (2) a control non-diseased sample contacted with an agent that modulates a target, and (iii) a third translational profile is from the disease sample contacted with the agent that modulates a target;
[0526] (b) determining a first differential translational profile comprising one or more genes differentially translated in the first translational profile as compared to the second translational profile, and determining a second differential translational profile comprising one or more genes differentially translated in the first translational profile as compared to the third translational profile; and
[0527] (c) validating the target as a target for normalizing a translational profile associated with a disease when the first differential translational profile is comparable to the second differential translational profile.

[0528] In any of the aforementioned embodiments for validating a target for normalizing a translational profile associated with a disease, the target is suspected of being associated with a disease, is indirectly associated with a disease, or is associated with a disease (e.g., an inflammatory disease, an autoimmune disease, a fibrotic disorder, a neurodegenerative disease, a neurodevelopmental disease, a metabolic disease, a viral infection, a cardiomyopathy or a cancer, respectively).

[0529] In some embodiments, one or more genes from each of at least two of the biological pathways are differentially translated in the first translational profile as compared to the second translational profile. In some embodiments, one or more genes from each of at least three of the biological pathways are differentially translated in the first translational profile as compared to the second translational profile. In some embodiments, there is at least a 1.5-fold or at least a two-fold difference (e.g., at least 1.5-fold, at least two-fold, at least three-fold, at least four-fold, at least five-fold, at least six-fold, at least seven-fold, at least eight-fold, at least nine-fold, at least ten-fold difference or more) in translational level for the one or more genes in the first translational profile as compared to the second translational profile. In some embodiments, the first, second, and/or third translational profiles comprise translational levels for a subset of the genome, e.g., for about 0.1%, 0.5%, 1%, 2%, 3%, 4%, 5%, 6%, 7%, 8%, 9%, 10%, 11%, 12%, 13%, 14%, 15%, 16%, 17%, 18%, 19%, 20%, 25%, 30%, 35%, 40%, 45%, 50% of the genome or more. In some embodiments, the first, second, and/or third translational profiles comprise a genome-wide measurement of gene translational levels.

[0530] The agent can be any agent as described herein. In some embodiments, the agent is a peptide, protein, inhibitory RNA, or small organic molecule.

[0531] For comparing multiple translational profiles, for example, for determining to which translational profile a given experimentation translational profile is “closer” to, in some embodiments, an experimental translational profile has at least a 1.5 log₂ change or difference (e.g., at least 1.5, at least 2.5, at least 3, at least 4, at least 5, at least 6, at least 7, at least 8, at least 9, at least 10 or more log₂ change or difference, e.g., increase or decrease) in translational rate, translational efficiency, or both for one or more genes or for a set of selected marker genes as compared to the same genes or gene markers from one or more reference translational profiles of interest. In some embodiments, an experimental translational profile has at least a 2.5 log₂ change or difference in translational rate, translational efficiency, or both for one or more genes or for a set of selected marker genes as compared to the same genes or gene markers from one or more reference translational profiles of interest. In some embodiments, an experimental translational profile has at least a 3 log₂ change or difference in translational rate, translational efficiency, or both for one or more genes or for a set of selected marker genes as compared to the same genes or gene markers from one or more reference translational profiles of interest.

[0532] In some embodiments, an experimental profile as compared to one or more reference translational profiles of interest has at least a 1.1 log₂ change in translational rate, translational efficiency, or both for at least 0.05%, 0.1%, 0.25%, 0.5%, at least 1%, at least 2%, at least 3%, at least 4%, at least 5%, at least 6%, at least 7%, at least 8%, at least 9%, at least 10%, at least 15%, at least 20%, at least 30%, at least 40%, at least 50%, at least 60%, at least 70%, at least 80%, or at least 90% or more of a set of selected marker genes or for the entire set of selected marker genes. In some embodiments, an experimental profile as compared to one or more reference translational profiles of interest has at least a 2 log₂ change in translational rate, translational efficiency, or both for at least 0.05%, 0.1%, 0.25%, 0.5%, at least 1%, at least 2%, at least 3%, at least 4%, at least 5%, at least 6%, at least 7%, at least 8%, at least 9%, at least 10%, at least 15%, at least 20%, at least 30%, at least 40%, at least 50%, at least 60%, at least 70%, at least 80%, or at least 90% or more of a set of selected marker genes or for the entire set of selected marker genes. In some embodiments, an experimental profile as compared to one or more reference translational profiles of interest has at least a 2.5 log₂ change in translational rate, translational efficiency, or both for at least 0.05%, 0.1%, 0.25%, 0.5%, at least 1%, at least 2%, at least 3%, at least 4%, at least 5%, at least 6%, at least 7%, at least 8%, at least 9%, at least 10%, at least 15%, at least 20%, at least 30%, at least 40%, at least 50%, at least 60%, at least 70%, at least 80%, or at least 90% or more of a set of selected marker genes or for the entire set of selected marker genes. In some embodiments, an experimental profile as compared to one or more reference translational profiles of interest has at least a 4 log₂ change in translational rate, translational efficiency, or both for at least 0.5%, at least 1%, at least 2%, at least 3%, at least 4%, at least 5%, at least 6%, at least 7%, at least 8%, at least 9%, at least 10%, at least 15%, at least 20%, at least 30%, at least 40%, at least 50%, at least 60%, at least 70%, at least 80%, or at least 90% or more of a set of selected marker genes or for the entire set of selected marker genes.

[0533] As described herein, differentially translated genes between first and second translational profiles under a first condition may exhibit translational profiles “closer to” each other (i.e., identified through a series of pair-wise comparisons to confirm a similarity of pattern) under one or more different conditions (e.g., differentially translated genes between a normal sample and a disease sample may have a more similar translational profile when the normal sample is compared to a disease sample contacted with a candidate agent; differentially translated genes between a disease sample and a disease sample treated with a known active agent may have a more similar translational profile when the disease sample treated with a known active agent is compared to the disease sample contacted with a candidate agent). In certain embodiments, a test translational profile is “closer to” a reference translational profile when at least of 99%, 95%, 90%, 85%, 80%, 75%, 70%, 65%, 60%, 55%, or 50% of a selected portion of differentially translated genes, a majority of differentially translated genes, or all differentially translated genes show a translational profile within 75%, 70%, 65%, 60%, 55%, 50%, 45%, 40%, 35%, 30%, or 25%, respectively, of their corresponding genes in the reference translational profile. In further embodiments, a selected portion of differentially translated genes, a majority of differentially translated genes, or all differentially translated genes from an experimental translational profile have a translational profile “closer to” the translational profile of the same genes in a reference translational profile when the amount of protein translated in the experimental and reference translational profiles are within about 3.0 log₂, 2.5 log₂, 2.0 log₂, 1.5 log₂, 1.1 log₂, 0.5 log₂, 0.2 log₂ or closer. In still further embodiments, a selected portion of differentially translated genes, a majority of differentially translated genes, or all differentially translated genes from an experimental translational profile have a translational profile “closer to” the translational profile of the same genes in a reference translational profile when the amount of protein translated in the experimental and reference translational profiles differs by no more than about 30%, 25%, 20%, 15%, 10%, 5%, 1% or less.

[0534] In some embodiments, an experimental differential profile as compared to a reference differential translational profile of interest has at least a 1.0 log₂ change in translational rate, translational efficiency, or both for at least 0.05%, at least 0.1%, at least 0.25%, at least 0.5%, at least 1%, at least 2%, at least 3%, at least 4%, at least 5%, at least 6%, at least 7%, at least 8%, at least 9%, at least 10%, at least 15%, at least 20%, at least 30%, at least 40%, at least 50%, at least 60%, at least 70%, at least 80%, or at least 90% or more of a set of selected differentially translated genes or for the entire set of selected differentially translated genes. In some embodiments, an experimental differential profile as compared to a reference differential translational profile of interest has at least a 2 log₂ change in translational rate, translational efficiency, or both for at least 0.05%, at least 0.1%, at least 0.25%, at least 0.5%, at least 1%, at least 5%, at least 10%, at least 15%, at least 20%, at least 30%, at least 40%, at least 50%, at least 60%, at least 70%, at least 80%, or at least 90% or more of a set of selected differentially translated genes or for the entire set of differentially translated genes. In some embodiments, an experimental differential profile as compared to a reference differential translational profile of interest has at least a 3 log₂ change in translational rate, translational efficiency, or both for at least 0.05%, at least 0.1%, at least 0.25%, at least 0.5%, at least 1%, at least 5%, at least 10%, at least 15%, at least 20%, at least 30%, at least 40%, at least 50%, at least 60%, at least 70%, at least 80%, or at least 90% or more of a set of selected differentially translated genes or for the entire set of selected differentially translated genes. In some embodiments, an experimental differential profile as compared to a reference differential translational profile of interest has at least a 4 log₂ change in translational levels for at least 0.05%, at least 0.1%, at least 0.25%, at least 0.5%, at least 1%, at least 5%, at least 10%, at least 15%, at least 20%, at least 30%, at least 40%, at least 50%, at least 60%, at least 70%, at least 80%, or at least 90% or more of a set of selected differentially translated genes or for the entire set of selected differentially translated genes.

[0535] As described herein, a differential translational profile between a first sample and a control may be “comparable” to a differential translational profile between a second sample and the control (e.g., the differential profile between a disease sample and the disease sample treated with a known active compound may be comparable to the differential profile between the disease sample and the disease sample contacted with a candidate agent; the differential profile between a disease sample and a non-diseased (normal) sample may be comparable to the differential profile between the disease sample and the disease sample contacted with a candidate agent). In certain embodiments, a test differential translational profile is “comparable to” a reference differential translational profile when at least of 99%, 95%, 90%, 80%, 70%, 60%, 50%, 25%, or 10% of a selected portion of differentially translated genes, a majority of differentially translated genes, or all differentially translated genes show a translational profile within 75%, 70%, 65%, 60%, 55%, 50%, 45%, 40%, 35%, 30%, or 25%, respectively, of their corresponding genes in the reference translational profile. In further embodiments, a differential translational profile comprising a selected portion of the differentially translated genes or all the differentially translated genes has a differential translational profile “comparable to” the differential translational profile of the same genes in a reference differential translational profile when the amount of protein translated in the experimental and reference differential translational profiles are within about 3.0 log₂, 2.5 log₂, 2.0 log₂, 1.5 log₂, 1.0 log₂, 0.5 log₂, 0.2 log₂ or closer. In still further embodiments, a differential translational profile comprising a selected portion of the differentially translated genes or all the differentially translated genes has a differential translational profile “comparable to” the differential translational profile of the same genes in a reference differential translational profile when the amount of protein translated in the experimental and reference differential translational profiles differs by no more than about 50%, 45%, 40%, 35%, 30%, 25%, 20%, 15%, 10%, 5%, 1% or less.

[0536] In some embodiments, the subject in need thereof is a subject having a pathogenic condition in which protein translation is known or suspected to be aberrant. In some embodiments, the subject has a condition in which aberrant translation is known to be causative for the pathogenic condition. In certain embodiments, the subject has a pathogenic condition in which altering the aberrant translation (e.g., increasing or decreasing) will prevent, ameliorate or treat the pathogenic condition. In certain embodiments, the target is associated with a disease selected from an inflammatory disease, autoimmune disease, fibrotic disorder, neurodegenerative disease, neurodevelopmental disease, metabolic disease, viral infection, cardiomyopathy or cancer.

### VIII. Examples

[0537] The following examples are offered to illustrate, but not to limit the claimed invention.

### Example 1

### Generation of a Comprehensive Map of Translationally Controlled mTOR Targets in Cancer Using Ribosome Profiling

[0538] Downstream of the phosphatidylinositol-3-OH kinase (PI(3)K)-AKT signalling pathway, mTOR assembles with either raptor or rictor to form two distinct complexes: mTORC1 and mTORC2. The major regulators of protein synthesis downstream of mTORC1 are 4EBP1 (also called EIF4EBP1) and p70S6K1/2. 4EBP1 negatively regulates eIF4E, a key rate-limiting initiation factor for cap-dependent translation. Phosphorylation of 4EBP1 by mTORC1 leads to its dissociation from eIF4E, allowing translation initiation complex formation at the 5′ end of mRNAs. The mTOR-dependent phosphorylation of p70S6K1/2 also promotes translation initiation as well as elongation. In this example, ribosome profiling delineates the translational landscape of the cancer genome at a codon-by-codon resolution upon pharmacological inhibition of mTOR. This method provides a genome-wide characterization of translationally controlled mRNAs downstream of oncogenic mTOR signalling and delineates their functional roles in cancer development.

[0539] mTOR is deregulated in nearly 100% of advanced human prostate cancers, and genetic findings in mouse models implicate mTOR hyperactivation in prostate cancer initiation. Given the critical role for mTOR in prostate cancer, PC3 human prostate cancer cells, in which mTOR is constitutively hyperactivated, were used to delineate translationally controlled gene expression networks upon complete or partial mTOR inhibition. Ribosome profiling was optimized to assess quantitatively ribosome occupancy genome-wide in cancer cells. In brief, ribosome-protected mRNA fragments were deep-sequenced to determine the number of ribosomes engaged in translating specific mRNAs (see FIG. 6a and Example 6 (“Methods”) below).

[0540] Treatment of PC3 cells with an mTOR ATP site inhibitor, PP242 (Feldman et al., PLoS Biol. 7:e38 (2009); Hsieh et al., Cancer Cell 17:249-261 (2010)), significantly inhibited the activity of the three primary downstream mTOR effectors 4EBP1, p70S6K1/2 and AKT. On the contrary, rapamycin, an allosteric mTOR inhibitor, only blocked p70S6K1/2 activity in these cells (FIG. 6b). Short 3-hr drug treatments, which precede alterations in de novo protein synthesis, were used to capture direct changes in mTOR-dependent gene expression by ribosome profiling and to minimize compensatory feedback mechanisms (FIG. 6c-f).

[0541] Ribosome profiling revealed 144 target mRNAs were selectively decreased at the translational level upon PP242 treatment (log₂≦−1.5 (false discovery rate <0.05)) as compared to rapamycin treatment, with limited changes in transcription (FIGS. 1a, 7a-b, and 8-10, Table 3, Table 5, Table 6, and Table 7). The fact that at this time point rapamycin treatment did not markedly affect gene expression is consistent with incomplete, allosteric, inhibition of mTOR activity (FIG. 6b). By monitoring footprints of translating 80S ribosomes, these findings showed that the effects of PP242 were largely at the level of translation initiation and not elongation (FIG. 8). It has been proposed that mRNAs translationally regulated by mTOR may contain long 5′ untranslated regions (5′ UTRs) with complex RNA secondary structures. On the contrary, ribosome profiling revealed that mTOR-responsive 5′ UTRs possess less complex features (FIG. 1b-d), providing a unique data set to investigate the nature of regulatory elements that render these mRNAs mTOR-sensitive. It has been previously shown that some mTOR translationally regulated mRNAs, most notably those involved in protein synthesis, possess a 5′ terminal oligopyrimidine tract (5′ TOP) that is regulated by distinct trans-acting factors. Of the 144 mTOR-sensitive target genes, 68% possessed a 5′ TOP (see Table 1). Additionally, another 5′ UTR consensus sequence, termed a pyrimidine-rich translational element (PRTE), was identified within the 5′ UTRs of 63% of mTOR target mRNAs (P=3.2×10⁻¹¹). This PRTE element, unlike the 5′ TOP sequence, consists of an invariant uridine at position 6 flanked by pyrimidines and does not reside at position +1 of the 5′ UTR (FIG. 7c and Table 2). 89% of the mTOR-responsive genes were found to possess a PRTE and/or 5′ TOP, making the presence of one or both sequences a strong predictor for mTOR sensitivity (FIG. 7d and Table 3). Notably, mRNA isoforms arising from distinct transcription start sites may possess both a 5′ TOP and a PRTE. Given the significant number of mRNAs that contain both the PRTE and 5′ TOP, a functional interplay may exist between these regulatory elements. Additionally, these findings show that the PRTE imparts translational control specificity to 4EBP1 activity.

[0542] Surprisingly, mTOR-sensitive genes stratified into unique functional categories that may promote cancer development and progression, including cellular invasion (P=0.009), cell proliferation (P=0.04), metabolism (P=0.0002) and regulators of protein modification (P=0.01) (FIG. 1e). The largest fraction of mTOR-responsive mRNAs clustered into a node consisting of key components of the translational apparatus: 70 ribosomal proteins, 6 elongation factors, and 4 translation initiation factors (P=7.5×10⁻⁸²) (FIG. 1e). Therefore, this class of mTOR-responsive mRNAs may represent an important regulon that sustains the elevated protein synthetic capacity of cancer cells.

[0543] The second largest node of mTOR translationally regulated genes comprised bona fide cell invasion and metastasis mRNAs and putative regulators of this process (FIG. 1e). This group included YB1 (Y-box binding protein 1; also called YBX1), vimentin, MTA1 (metastasis associated 1) and CD44 (FIG. 11a). YB1 regulates the post-transcriptional expression of a network of invasion genes. Vimentin, an intermediate filament protein, is highly upregulated during the epithelial-to-mesenchymal transition associated with cellular invasion. MTA1, a putative chromatin-remodeling protein, is overexpressed in invasive human prostate cancer and has been shown to drive cancer metastasis by promoting neoangiogenesis. CD44 is commonly overexpressed in tumor-initiating cells and is implicated in prostate cancer metastasis. Consistent with their status as mTOR-sensitive genes, YB1, vimentin, MTA1 and CD44 all possess a PRTE (Table 2). Vimentin and CD44 also possess a 5′ TOP (Table 3). To test the functional role of the PRTE in mediating translational control, the PRTE was mutated within the 5′ UTR of YB1, which rendered the YB1 5′ UTR insensitive to inhibition by 4EBP1 (FIG. 11b). These findings highlight a novel cis-regulatory element that may modulate translational control of subsets of mRNAs upon mTOR activation. Moreover, ribosome profiling reveals unexpected transcript-specific translational control, mediated by oncogenic mTOR signaling, including a distinct set of pro-invasion and metastasis genes.

TABLE 5
Mean list of translationally regulated PP242-responsive genes

| | | Rapamycin | | PP242 | |
|---|---|---|---|---|---|
| Gene | Description | mRNA | TrlEff | mRNA | TrlEff |
| EEF2 | eukaryotic translation elongation | 0.39 | −1.12 | 0.76 | −3.60 |
| | factor 2 | | | | |
| EEF1A1 | eukaryotic translation elongation | 0.43 | −1.58 | 0.36 | −3.21 |
| | factor 1 alpha 1 | | | | |
| RPL13A | ribosomal protein L13a | 0.15 | −1.25 | 0.30 | −3.10 |
| RPS12 | ribosomal protein S12 | 0.11 | −1.22 | 0.04 | −3.00 |
| RPL12 | ribosomal protein L12 | 0.07 | −0.94 | 0.12 | −2.95 |
| RPS27 | ribosomal protein S27 | 0.10 | −1.54 | 0.07 | −2.71 |
| RPS28 | ribosomal protein S28 | 0.01 | −0.80 | 0.28 | −2.67 |
| RPL18A | ribosomal protein L18a | 0.17 | −0.82 | 0.23 | −2.63 |
| RPL34 | ribosomal protein L34 | 0.11 | −1.12 | 0.04 | −2.63 |
| RPL28 | ribosomal protein L28 isoform 1 | 0.24 | −1.09 | 0.22 | −2.54 |
| RPL27A | ribosomal protein L27a | 0.06 | −0.96 | 0.07 | −2.53 |
| CRTAP | cartilage associated protein | 0.29 | −1.17 | 0.33 | −2.50 |
| RPL10 | ribosomal protein L10 | 0.09 | −0.79 | 0.25 | −2.46 |
| RPS20 | ribosomal protein S20 isoform 1 | 0.18 | −1.35 | −0.01 | −2.46 |
| RPL21 | ribosomal protein L21 | 0.14 | −1.25 | −0.04 | −2.45 |
| RPL3 | ribosomal protein L3 isoform a | 0.18 | −1.08 | 0.22 | −2.44 |
| RPL39 | ribosomal protein L39 | 0.17 | −1.65 | −0.15 | −2.41 |
| RPL37A | ribosomal protein L37a | 0.08 | −1.02 | 0.01 | −2.38 |
| VIM | vimentin | 0.36 | −0.40 | 0.67 | −2.38 |
| EEF1D | eukaryotic translation elongation | 0.18 | −0.84 | 0.35 | −2.37 |
| | factor 1 delta | | | | |
| GNB2L1 | Guanine nucleotide binding protein | 0.19 | −0.77 | 0.27 | −2.35 |
| | (G protein) | | | | |
| RPS19 | ribosomal protein S19 | 0.15 | −0.74 | 0.23 | −2.34 |
| RPL32 | ribosomal protein L32 | 0.22 | −0.97 | 0.11 | −2.33 |
| RPS15A | ribosomal protein S15a | 0.07 | −0.96 | 0.07 | −2.31 |
| RPL11 | ribosomal protein L11 | 0.09 | −1.08 | 0.14 | −2.31 |
| RPL7A | ribosomal protein L7a | 0.17 | −0.74 | 0.15 | −2.30 |
| YB1 | Y-box binding protein 1 | 0.11 | −0.59 | 0.24 | −2.30 |
| RPS9 | ribosomal protein S9 | 0.10 | −0.60 | 0.34 | −2.27 |
| EIF4B | eukaryotic translation initiation | 0.55 | −1.21 | 0.61 | −2.27 |
| | factor 4B | | | | |
| EEF1G | eukaryotic translation elongation | 0.21 | −1.15 | 0.15 | −2.26 |
| | factor 1, gamma | | | | |
| RPS2 | ribosomal protein S2 | 0.07 | −0.56 | 0.20 | −2.25 |
| RPS5 | ribosomal protein S5 | 0.14 | −0.77 | 0.23 | −2.25 |
| HSPA8 | heat shock 70 kDa protein 8 isoform 1 | −0.21 | −0.46 | −0.40 | −2.25 |
| RPS3A | ribosomal protein S3a | 0.22 | −1.15 | −0.06 | −2.17 |
| RPS3 | ribosomal protein S3 | 0.22 | −0.92 | 0.24 | −2.16 |
| RPL10A | ribosomal protein L10a | 0.16 | −0.94 | 0.14 | −2.16 |
| RPS25 | ribosomal protein S25 | 0.04 | −0.89 | −0.04 | −2.13 |
| GLTSCR2 | glioma tumor suppressor candidate | 0.31 | −0.68 | 0.70 | −2.12 |
| | region gene 2 | | | | |
| HNRNPA1 | heterogeneous nuclear | 0.18 | −0.86 | 0.27 | −2.12 |
| | ribonucleoprotein A1 | | | | |
| RPLP2 | ribosomal protein P2 | 0.26 | −1.18 | 0.14 | −2.10 |
| RPL31 | ribosomal protein L31 isoform 2 | −0.02 | −0.62 | 0.05 | −2.10 |
| PABPC1 | poly(A) binding protein, | 0.35 | −1.44 | 0.16 | −2.09 |
| | cytoplasmic 1 | | | | |
| RPS21 | ribosomal protein S21 | −0.01 | −0.60 | 0.09 | −2.09 |
| RPS4X | ribosomal protein S4, X-linked X | 0.18 | −1.15 | 0.12 | −2.06 |
| | isoform | | | | |
| RPLP1 | ribosomal protein P1 isoform 1 | 0.28 | −1.09 | 0.12 | −2.06 |
| RPL7 | ribosomal protein L7 | 0.15 | −1.06 | 0.01 | −2.02 |
| RPL26 | ribosomal protein L26 | 0.15 | −1.11 | 0.02 | −2.00 |
| PABPC4 | poly A binding protein, cytoplasmic | 0.24 | −0.80 | 0.40 | −1.98 |
| | 4 isoform 1 | | | | |
| RPL36A | ribosomal protein L36a | 0.13 | −1.11 | −0.01 | −1.98 |
| EEF1A2 | eukaryotic translation elongation | 0.03 | −0.03 | 0.40 | −1.94 |
| | factor 1 alpha 2 | | | | |
| TPT1 | tumor protein, translationally- | 0.24 | −1.22 | 0.01 | −1.94 |
| | controlled 1 | | | | |
| AHCY | adenosylhomocysteinase isoform 1 | 0.20 | −0.23 | 0.38 | −1.93 |
| RPL22L1 | ribosomal protein L22-like 1 | 0.15 | −0.68 | 0.39 | −1.90 |
| GAPDH | glyceraldehyde-3-phosphate | 0.17 | −0.27 | 0.28 | −1.90 |
| | dehydrogenase | | | | |
| RPL30 | ribosomal protein L30 | 0.11 | −0.99 | 0.01 | −1.89 |
| RPS11 | ribosomal protein S11 | 0.11 | −0.59 | 0.20 | −1.88 |
| RPL29 | ribosomal protein L29 | 0.10 | −0.50 | 0.20 | −1.88 |
| RPL14 | ribosomal protein L14 | 0.07 | −0.68 | −0.02 | −1.85 |
| RPL36 | ribosomal protein L36 | 0.09 | −0.43 | 0.28 | −1.85 |
| EIF2S3 | eukaryotic translation initiation | 0.33 | −1.04 | 0.15 | −1.85 |
| | factor 2, S3 | | | | |
| RPL23 | ribosomal protein L23 | 0.09 | −0.92 | 0.07 | −1.82 |
| RPS16 | ribosomal protein S16 | 0.13 | −0.38 | 0.19 | −1.81 |
| SLC25A5 | adenine nucleotide translocator 2 | 0.21 | −0.30 | 0.15 | −1.80 |
| RPL17 | ribosomal protein L17 | 0.05 | −0.93 | 0.07 | −1.80 |
| RPL37 | ribosomal protein L37 | 0.11 | −0.68 | 0.10 | −1.79 |
| RPL8 | ribosomal protein L8 | 0.12 | −0.40 | 0.29 | −1.79 |
| NAP1L1 | nucleosome assembly protein 1-like 1 | 0.24 | −0.97 | 0.15 | −1.79 |
| RPS10 | ribosomal protein S10 | 0.16 | −0.69 | 0.19 | −1.78 |
| IPO7 | importin 7 | 0.20 | −0.83 | 0.26 | −1.75 |
| RPS8 | ribosomal protein S8 | 0.09 | −0.44 | 0.14 | −1.74 |
| RPL5 | ribosomal protein L5 | 0.17 | −1.11 | 0.06 | −1.73 |
| RPS24 | ribosomal protein S24 isoform d | 0.11 | −1.16 | −0.01 | −1.73 |
| EEF1B2 | eukaryotic translation elongation | 0.12 | −1.10 | −0.06 | −1.70 |
| | factor 1 beta 2 | | | | |
| RPL6 | ribosomal protein L6 | 0.09 | −0.68 | 0.06 | −1.68 |
| RPS23 | ribosomal protein S23 | 0.15 | −1.19 | −0.03 | −1.68 |
| RPL18 | ribosomal protein L18 | 0.08 | −0.42 | 0.18 | −1.65 |
| RPS29 | ribosomal protein S29 isoform 2 | −0.01 | −0.69 | 0.11 | −1.65 |
| RPS6 | ribosomal protein S6 | 0.14 | −1.06 | −0.02 | −1.65 |
| RPL22 | ribosomal protein L22 | 0.08 | −0.89 | 0.00 | −1.64 |
| UBA52 | ubiquitin and ribosomal protein L40 | 0.12 | −0.22 | 0.18 | −1.62 |
| RPLP0 | ribosomal protein PO | 0.15 | −0.42 | 0.12 | −1.61 |
| RPS27A | ubiquitin and ribosomal protein | 0.16 | −0.89 | −0.04 | −1.61 |
| | S27a | | | | |
| RPL9 | ribosomal protein L9 | 0.16 | −1.00 | −0.08 | −1.59 |
| TKT | transketolase isoform 1 | 0.02 | −0.11 | 0.33 | −1.58 |
| RPL13 | ribosomal protein L13 | 0.14 | −0.38 | 0.26 | −1.56 |
| EIF3H | eukatyotic translation initiation | 0.16 | −0.79 | 0.09 | −1.54 |
| | factor 3, | | | | |
| RPS13 | ribosomal protein S13 | 0.07 | −0.82 | −0.08 | −1.54 |
| RPS7 | ribosomal protein S7 | 0.11 | −0.76 | −0.04 | −1151 |
| RPS14 | ribosomal protein S14 | 0.10 | −0.60 | 0.16 | −1.50 |
| RPL4 | ribosomal protein L4 | 0.22 | −0.85 | 0.10 | −1.50 |
| FAM128B | hypothetical protein LOC80097 | 0.06 | 0.27 | 0.43 | −1.47 |
| EIF3L | eukaryotic translation initiation | 0.28 | −0.85 | 0.21 | −1.47 |
| | factor 3L | | | | |
| RABGGTB | RAB geranylgeranyltransferase, | −0.20 | −0.84 | 0.20 | −1.46 |
| | beta subunit | | | | |
| FASN | fatty acid synthase | −0.37 | 0.47 | 0.30 | −1.42 |
| RPL24 | ribosomal protein L24 | 0.11 | −0.63 | 0.00 | −1.41 |
| ACTG1 | actin, gamma 1 propeptide | 0.02 | −0.07 | 0.28 | −1.40 |
| PFDN5 | prefoldin subunit 5 isoform alpha | 0.11 | −0.51 | 0.04 | −1.38 |
| LMF2 | lipase maturation factor 2 | 0.22 | 0.39 | 0.62 | −1.36 |
| RPL19 | ribosomal protein L19 | 0.14 | −0.66 | 0.11 | −1.35 |
| PGM1 | phosphoglucomutase 1 | 0.40 | −0.55 | 0.23 | −1.35 |
| CCNI | cyclin I | 0.29 | −0.45 | 0.24 | −1.33 |
| IMPDH2 | inosine monophosphate | 0.11 | −0.39 | 0.21 | −1.33 |
| | dehydrogenase 2 | | | | |
| AP2A1 | adaptor-related protein complex 2, | 0.09 | −0.04 | 0.42 | −1.32 |
| | alpha 1 | | | | |
| AGRN | agrin precursor | 0.01 | 0.51 | 0.50 | −1.29 |
| COL6A2 | alpha 2 type VI collagen isoform | −0.08 | 0.43 | 0.57 | −1.29 |
| | 2C2 | | | | |
| CD44 | CD44 antigen isoform 1 | 0.34 | −0.46 | 0.43 | −1.29 |
| RPL41 | ribosomal protein L41 | 0.04 | −1.15 | −0.01 | −1.28 |
| ALKBH7 | spermatogenesis associated 11 | 0.06 | 0.28 | 0.51 | −1.27 |
| | precursor | | | | |
| RPL27 | ribosomal protein L27 | 0.05 | −0.33 | −0.13 | −1.23 |
| RPL15 | ribosomal protein L15 | 0.11 | −0.51 | 0.19 | −1.20 |
| RPS15 | ribosomal protein S15 | −0.01 | 0.03 | 0.21 | −1.19 |
| CLPTM1 | cleft lip and palate associated | 0.07 | 0.26 | 0.41 | −1.13 |
| | transmembrane | | | | |
| FAM83H | FAM83H | −0.17 | 0.71 | 0.33 | −1.11 |
| PGLS | 6-phosphogluconolactonase | 0.03 | 0.20 | 0.21 | −1.11 |
| MTA1 | metastasis associated 1 | 0.00 | −0.05 | 0.21 | −1.09 |
| TSC2 | tuberous sclerosis 2 isoform 1 | −0.15 | 0.34 | 0.21 | −1.09 |
| PACS1 | phosphofurin acidic cluster sorting | 0.07 | 0.04 | 0.45 | −1.09 |
| | protein 1 | | | | |
| CIRBP | cold inducible RNA binding protein | 0.14 | 0.10 | 0.54 | −1.08 |
| SLC19A1 | solute carrier family 19 member 1 | −036 | 0.23 | 0.10 | −1.07 |
| ECSIT | evolutionarily conserved signaling | −0.04 | 0.41 | 0.26 | −1.06 |
| | intermediate | | | | |
| ARD1A | alpha-N-acetyltransferase 1A | −0.04 | 0.01 | 0.03 | −1.05 |
| C21orf66 | GC-rich sequence DNA-binding | −0.30 | −0.09 | −0.31 | −1.03 |
| | factor candidate | | | | |
| ATP5G2 | ATP synthase, H+ transporting, | 0.29 | −0.28 | 0.17 | −1.01 |
| | mitochondrial F0 | | | | |
| LAMA5 | laminin alpha 5 | −0.32 | 0.87 | 0.40 | −0.94 |
| PNKP | polynucleotide kinase 3′ | −0.24 | 0.74 | 0.33 | −0.79 |
| | phosphatase | | | | |
| EVPL | envoplakin | −0.08 | 0.30 | 0.38 | −0.79 |
| NCLN | nicalin | −0.05 | 0.67 | 0.29 | −0.76 |
| PTGES2 | prostaglandin E synthase 2 | −0.19 | 0.52 | 0.17 | −0.65 |
| GAMT | guanidinoacetate N- | n/a | n/a | n/a | n/a |
| | methyltransferase isoform b | | | | |
| CTSH | cathepsin H isoform b | n/a | n/a | n/a | n/a |
| TUBB3 | tubulin, beta, 4 | n/a | n/a | n/a | n/a |
| CSDA | cold shock domain protein A | n/a | n/a | n/a | n/a |
| ETHE1 | ETHE1 protein | n/a | n/a | n/a | n/a |
| LCMT1 | leucine carboxyl methyltransferase | n/a | n/a | n/a | n/a |
| | 1 isoform a | | | | |
| PC | pyruvate carboxylase | n/a | n/a | n/a | n/a |
| SECTM1 | secreted and transmembrane 0 | n/a | n/a | n/a | n/a |
| COL18A1 | alpha 1 type XVIII collagen | n/a | n/a | n/a | n/a |
| | isoform 3 | | | | |
| CHP | calcium binding protein P22 | n/a | n/a | n/a | n/a |
| BRF1 | transcription initiation factor IIIB | n/a | n/a | n/a | n/a |
| C2orf79 | hypothetical protein LOC391356 | n/a | n/a | n/a | n/a |
| SEPT8 | septin 8 isoform a | n/a | n/a | n/a | n/a |
| ABCB7 | ATP-binding cassette, sub-family | n/a | n/a | n/a | n/a |
| | B, member 7 | | | | |
| MYH14 | myosin, heavy chain 14 isoform 3 | n/a | n/a | n/a | n/a |
| SIGMAR1 | sigma non-opioid intracellular | n/a | n/a | n/a | n/a |
| | receptor 1 | | | | |
| C3orf38 | hypothetical protein LOC285237 | n/a | n/a | n/a | n/a |

TABLE 6
List of rapamycin-sensitive translationally regulated genes after 3-hour treatment
with rapamycin (50 nM) or PP242 (2.5 μM) in PC3 cells.

| | | Rapamycin | | PP242 | |
|---|---|---|---|---|---|
| Gene | Description | mRNA | TrlEff | mRNA | TrlEff |
| MAPK6 | mitogen-activated protein kinase 6 | 0.13 | −2.43 | 0.10 | −0.29 |
| RPL39 | ribosomal protein L39 | 0.30 | −2.11 | −0.42 | −2.53 |
| RPS20 | ribosomal protein S20 isoform 1 | 0.14 | −1.79 | −0.10 | −2.78 |
| PRKD3 | protein kinase D3 | −0.22 | −1.72 | −0.46 | 0.68 |
| UBTD2 | dendritic cell-derived ubiquitin- | 0.19 | −1.64 | 0.25 | 0.27 |
| | like protein | | | | |
| RPL28 | ribosomal protein L28 isoform 1 | 0.64 | −1.59 | 0.55 | −3.48 |
| RBPJ | recombining binding protein | 1.09 | −1.58 | 0.17 | −0.03 |
| | suppressor of | | | | |
| EEF1A1 | eukaryotic translation elongation | 0.46 | −1.57 | 0.29 | −3.53 |
| | factor 1 alpha | | | | |
| UCHL5 | ubiquitin carboxyl-terminal | −0.08 | −1.56 | −0.51 | 0.40 |
| | hydrolase L5 | | | | |
| RPS27 | ribosomal protein S27 | 0.07 | −1.55 | 0.06 | −3.35 |
| SDCCAG10 | serologically defined colon cancer | −0.19 | −1.50 | −0.37 | 0.23 |
| | antigen 10 | | | | |
| MAPKAPK2 | mitogen-activated protein kinase- | −0.21 | 1.50 | −0.22 | 0.92 |
| | activated | | | | |
| NFATC21P | nuclear factor of activated T-cells, | −0.16 | 1.54 | 0.08 | 0.35 |
| | 2IP | | | | |
| GTPBP3 | GTP binding protein 3 | −0.73 | 1.56 | 0.15 | −0.83 |
| | (mitochondrial) isoform V | | | | |
| C17orf28 | hypothetical protein LOC283987 | −0.44 | 1.66 | 0.21 | −0.20 |
| VHL | von Hippel-Lindau tumor | −0.23 | 1.67 | 0.43 | 0.52 |
| | suppressor isoform 1 | | | | |
| DDX51 | DEAD (Asp-Glu-Ala-Asp) box | −0.24 | 1.68 | 0.17 | −0.51 |
| | polypeptide 51 | | | | |
| DGCR2 | integral membrane protein | −0.66 | 1.69 | 0.05 | 0.02 |
| | DGCR2 | | | | |
| CCNA1 | cyclin A1 isoform a | −0.51 | 1.81 | −0.33 | 0.66 |
| NR2F1 | nuclear receptor subfamily 2, | 0.05 | 1.94 | 0.87 | −0.09 |
| | group F, member 1 | | | | |
| ACD | adrenocortical dysplasia homolog | −0.96 | 2.06 | 0.20 | −1.02 |
| | isoform 1 | | | | |

TABLE 7
PP242 and rapamycin transcriptional targets.

| | | |
|---|---|---|
| Gene | Description | mRNA |

A. PP242 sensitive transcriptionally regulated genes upon
3-hour treatment with PP242 (2.5 μM) in PC3 cells*

| | | |
|---|---|---|
| FGFBP1 | fibroblast growth factor binding protein 1 | −1.75 |
| BRIX1 | ribosome biogenesis protein BRX1 homolog | −1.51 |
| FOXA1 | forkhead box A1 | 1.45 |
| CYR61 | cysteine-rich, angiogenic inducer, 61 precursor | 1.47 |
| MT2A | metallothionein 2A | 1.47 |
| SOX4 | SRY (sex determining region Y)-box 4 | 1.51 |
| BCL6 | B-cell lymphoma 6 protein isoform 1 | 1.59 |
| KLF6 | Kruppel-like factor 6 isoform A | 1.75 |
| RND3 | ras homolog gene family, member E precursor | 1.78 |
| CTGF | connective tissue growth factor precursor | 1.80 |
| HBP1 | HMG-box transcription factor 1 | 1.88 |
| ARID5B | AT rich interactive domain 5B (MRF1-like) | 1.93 |
| PLAU | plasminogen activator, urokinase isoform 1 | 2.04 |
| GDF15 | growth differentiation factor 15 | 3.02 |

B. Rapamycin sensitive transcriptionally regulated genes
upon 3-hour treatment with rapamycin (50 nM) in PC3 cells*

| | | |
|---|---|---|
| HBP1 | HMG-box transcription factor 1 | −1.75 |

*log₂ fold change

### Example 2

### Translation of Pro-Invasion mRNAs by mTOR

[0544] To extend the use of the mTOR pharmacological tools used in ribosome profiling towards functional characterization of the newly identified mTOR-sensitive cell invasion gene signature, a new clinical-grade mTOR ATP site inhibitor was developed that was derived from the PP242 chemical scaffold. In brief, a structure-guided optimization of pyrazolopyrimidine derivatives was performed that improved oral bioavailability while retaining mTOR kinase potency and selectivity. The ATP site inhibitor of mTOR was selected for clinical studies on the basis of its high potency (1.4 nM inhibition constant (Kᵢ)), selectivity for mTOR, low molecular mass, and favorable pharmaceutical properties.

[0545] Using either PP242 or the new (or optimized) ATP site inhibitor of mTOR, a selective decrease in the expression of YB1, MTA1, vimentin, and CD44 was observed at the protein but not transcript level in PC3 cells starting at 6 hr of treatment, which preceded any decrease in de novo protein synthesis (FIGS. 1f-1g, 6c-d, 12, and 13). In contrast, rapamycin treatment did not alter their expression (FIGS. 1g and 12a). Similar findings were observed using a broad panel of metastatic cell lines of distinct histological origins (FIG. 14). The four-gene invasion signature (YB1, MTA1, vimentin and CD44) was positively regulated by mTOR hyperactivation, as silencing PTEN expression increased their protein but not mRNA expression levels (FIG. 15). Next, the effects of mTOR ATP site inhibitors on prostate cancer cell migration and invasion were investigated. The ATP site inhibitor of mTOR, but not rapamycin, decreased the invasive potential of PC3 prostate cancer cells (FIG. 2a). Furthermore, the ATP site inhibitor of mTOR inhibited cancer cell migration starting at 6 hr of treatment, precisely correlating with when decreases in the expression of pro-invasion genes were evident, but preceding any changes in the cell cycle or overall global protein synthesis (FIGS. 2b-c, 6c, 6e, 6f, 12b, and 16).

[0546] Among the genes comprising the pro-invasion signature, YB1 has been shown to act directly as a translation factor that controls expression of a larger set of genes involved in breast cancer cell invasion. Notably, YB1 translationally-regulated target mRNAs, including SNAIL1 (also called SNAI), LEFT and TWIST1, decreased at the protein but not transcript level upon YB1 knockdown in PC3 cells (FIGS. 17 and 18). To determine the functional role of YB1 in prostate cancer cell invasion, YB1 gene expression was silenced in PC3 cells and a 50% reduction in cell invasion was observed (FIG. 2d). Similarly, knockdown of MTA1, CD44, or vimentin also inhibited prostate cancer cell invasion (FIGS. 2d and 17). These mTOR target mRNAs may be sufficient to endow primary prostate cells with invasive features, as overexpression of YB1 and/or MTA1 (FIG. 19a) in BPH-1 cells, an untransformed prostate epithelial cell line, increased the invasive capacity of these cells in an additive manner (FIG. 2e). Notably, the effects of YB1 and MTA1 on cell invasion were independent from any effect on cell proliferation in both knockdown or overexpression studies (FIG. 19b-c). Therefore, translational control of pro-invasion mRNAs by oncogenic mTOR signaling alters the ability of epithelial cells to migrate and invade, a key feature of cancer metastasis.

### Example 3

### Dissecting mTOR Translational Effectors

[0547] To determine the molecular mechanism by which pro-invasion genes are regulated at the translational level and why these mRNAs are sensitive to an ATP site inhibitor of mTOR but not rapamycin, we investigated whether the downstream translational regulators mTORC1, 4EBP1, and/or p70S6K1/2 controlled the expression of these mTOR-sensitive targets. A human prostate cancer cell line was generated that stably expressed a doxycycline-inducible dominant-negative mutant of 4EBP1 (4EBP1^{M}) (FIG. 3a) (Hsieh et al., Cancer Cell 17:249-261 (2010)). This mutant binds to eIF4E, decreasing its hyperactivation without inhibiting general mTORC1 function (FIG. 20a). Notably, expression of 4EBP1^{M} did not alter global protein synthesis (FIG. 20b), probably because endogenous 4EBP1 and 4EBP2 proteins retain their ability to bind to eIF4E (FIG. 24c). Upon induction of 4EBP1^{M}, YB1, vimentin, CD44 and MTA1 decreased at the protein but not mRNA level (FIGS. 3b-c and 24d).

[0548] Next, we tested whether an ATP site inhibitor of mTOR decreases expression of the four invasion genes through the 4EBP-eIF4E axis. Notably, knockdown of 4EBP1 and 4EBP2 in PC3 cells or using 4EBP1 and 4EBP2 double knockout mouse embryonic fibroblasts (MEFs) (Dowling et al., Science 328:1172-1176 (2010)) reduced the ability of the ATP site inhibitor of mTOR to decrease expression of these pro-invasion mRNAs (FIGS. 3d-e and 21). Furthermore, ablation of mTORC2 activity had no effect on the expression of these mRNAs or responsiveness to ATP site inhibitor of mTOR (FIGS. 3f and 22a-c). Next, we determined the effect of 4EBP1^{M} on human prostate cancer cell invasion. The expression of 4EBP1^{M} resulted in a significant decrease in prostate cancer cell invasion without affecting the cell cycle, whereas DG-2 had no effect (FIGS. 3g and 22d). These findings demonstrate that eIF4E hyperactivation downstream of oncogenic mTOR regulates translational control of the pro-invasion mRNAs and provides an explanation for the selective targeting of this gene signature by mTOR ATP site inhibitors.

### Example 4

### Examining Cell Invasion Networks In Vivo

[0549] Both CK5⁺ and CK8⁺ prostate epithelial cells have been implicated in the initiation of prostate cancer upon loss of PTEN (Wang et al., Nature 461:495-500 (2009); Mulholland et al., Cancer Res. 69:8555-8562 (2009)). Pten^{loxp/loxp}; Pb-cre (Pten^{L/L}) mice are an ideal model of prostate cancer because they display distinct stages of cancer development (prostatic intraepithelial neoplasia, invasive adenocarcinoma, and metastasis) (Wang et al., Cancer Cell 4:209-221 (2003)). However, the expression patterns of YB1, vimentin, CD44 and MTA1 in prostate basal (CK5⁺) and luminal (CK8⁺) epithelial cells have not been characterized.

[0550] We therefore analyzed their expression patterns in the Pten^{L/L} prostate cancer mouse model, where mTOR is constitutively hyperactivated. YB1 localized to the cytoplasm and nucleus of CK5⁺ and CK8⁺ prostate epithelial cells, consistent with its ability to shuttle between the two cellular compartments (FIGS. 4a-b, 23a-b). MTA1 expression was exclusively nuclear in both cell types (FIG. 4c-d). CD44 expression was observed within a subset of CK5⁺ and CK8⁺ epithelial cells (FIG. 4e-f). CD44, together with other cell-surface markers, has been used to isolate a rare prostate stem-cell population (Leong et al., Nature 456:804-818 (2008)). In contrast, vimentin was not detected in either cell type (FIG. 4g). Next, the impact of mTOR hyperactivation on the expression pattern of the pro-invasion gene signature was determined. YB1, MTA1, and CD44 protein, but not transcript, levels were significantly increased in both Pten^{L/L} luminal and basal epithelial cells compared to wild-type (FIGS. 4h and 23c-e). These studies reveal a unique, translationally controlled signature of gene expression downstream of mTOR hyperactivation in a cancer-initiating subset of pro-state epithelial cells.

### Example 5

### Targeting Prostate Cancer Metastasis

[0551] In a preclinical trial of RAD001 (rapalog) versus an ATP site inhibitor of mTOR in Pten^{L/L} mice, 4EBP1 and p70S6K1/2 phosphorylation was completely restored to wild-type levels after treatment with the ATP site inhibitor of mTOR, whereas RAD001 only decreased p70S6K1/2 phosphorylation levels (FIG. 24a-b). Next, the cellular consequences of complete versus partial mTOR inhibition during distinct stages of prostate cancer were determined. Treatment with the ATP site inhibitor of mTOR resulted in a 50% decrease in prostatic intraepithelial neoplasia (PIN) lesions in Pten^{L/L} mice that was associated with decreased proliferation and a tenfold increase in apoptosis (FIG. 24d-f). Notably, the unique cytotoxic properties of ATP site inhibitor of mTOR treatment in Pten^{L/L} mice were evidenced by a marked reduction in prostate cancer volume. In addition, and consistent with these findings, the ATP site inhibitor of mTOR induced programmed cell death in multiple cancer cell lines (FIG. 25a-b). In contrast, RAD001 treatment mainly had cytostatic effects leading to only partial regression of PIN lesions associated with a limited decrease in cell proliferation and no significant effect on apoptosis (FIG. 28c-f).

[0552] The preclinical trial was extended by examining the effects of the ATP site inhibitor of mTOR treatment on the pro-invasion gene signature and prostate cancer metastasis, which is incurable and the primary cause of patient mortality. Cell invasion is the critical first step in metastasis, required for systemic dissemination. In Pten^{L/L} mice after the onset of PIN, a subset of prostate glands showed characteristics of luminal epithelial cell invasion by 12 months (FIGS. 5a and 25c). After 12 months of age, Pten^{L/L} mice developed lymph-node metastases and these cells maintained strong YB1 and MTA1 expression (FIG. 5b). These findings were extended directly to human prostate cancer patient specimens, in which it was observed that YB1 expression levels increased in a stepwise fashion from normal prostate to castration-resistant prostate cancer (CRPC), an advanced form of the disease associated with increased metastatic potential (FIG. 5c). Similar increases have been observed in MTA1 levels (Hofer et al., Cancer Res. 64:825-829 (2004)).

[0553] In human prostate cancer, high-grade primary tumors that display invasive features are more likely to develop systemic metastasis than low-grade non-invasive tumors. Remarkably, treatment with the ATP site inhibitor of mTOR completely blocked the progression of invasive prostate cancer locally in the prostate gland, and profoundly inhibited the total number and size of distant metastases (FIG. 5d-f). This was associated with a marked decrease in the expression of YB1, vimentin, CD44, and MTA1 at the protein, but not transcript, level in specific epithelial cell types within pre-invasive PIN lesions in Pten^{L/L} mice (FIG. 5g and FIG. 23c). Together, these findings reveal an unexpected role for oncogenic mTOR signaling in control of a pro-invasion translational program that, along with the lethal metastatic form of prostate cancer, can be efficiently targeted with clinically relevant mTOR ATP site inhibitors. These findings also demonstrate that translational profiling can be used to identify or validate targets for therapeutic intervention, such as genes that are modulated in cancer.

### Example 6

### Methods

[0554] Mice.

[0555] Pten^{loxp/loxp} and Pb-cre mice where obtained from Jackson Laboratories and Mouse Models of Human Cancers Consortium (MMHCC), respectively, and maintained in the C57BL/6 background. Mice were maintained under specific pathogen-free conditions, and experiments were performed in compliance with institutional guidelines as approved by the Institutional Animal Care and Use Committee of UCSF.

[0556] Cell Culturing and Reagents.

[0557] Human cell lines were obtained from the ATCC and maintained in the appropriate medium with supplements as suggested by ATCC. Wild-type, mSin1^{-/-}, and 4EBP1/4EBP2 double knockout MEFs were cultured as previously described (Dowling et al., Science 328:1172-1176 (2010); Jacinto et al., Cell 127:125-137 (2006). SMARTvector 2.0 (Thermo Scientific) lentiviral shRNA constructs were used to knock down PTEN(SH-003023-02-10). For generation of GFP-labeled PC3 cells, SMARTvector 2.0 lentiviral empty vector control particles that contained TurboGFP (S-004000-01) were used. Control (D-001810-01), YB1 (L-010213), MTA1 (L-004127), CD44 (L-009999), vimentin (L-003551), rictor (LL-016984), 4EBP1 (L-003005), and 4EBP2 (L-018671) pooled siRNAs were purchased from Thermo Scientific. The ATP site inhibitors of mTOR INK128 and PP242 were used at 200 nM and 2.5 μM in cell-based assays unless otherwise specified. RAD001 was obtained from LC Laboratories. DG-2 was used at 20 μM in cell-based assays. Rapamycin was purchased from Calbiochem and used at 50 nM in cell-based assays. Doxycyline (Sigma) was used at 1 μg ml⁻¹ in 4EBP1^{M} induction assays. Lipofectamine 2000 (Invitrogen) was used to transfect cancer cell lines with siRNA. Amaxa Cell Line Nucleofector Kit R (Lonza) was used to electroporate BPH-1 cells with overexpression vectors. The 4EBP1^{M} has been previously described (Hsieh et al., Cancer Cell 17:249-261 (2010)).

[0558] Plasmids.

[0559] pcDNA3-HA-YB1 was provided by V. Evdokimova. pCMV6-Myk-DDK-MTA1 was purchased from Origene. pGL3-Promoter was purchased from Promega. To clone the 5′ UTR of YB1 into pGL3-Promoter, the entire 5′ UTR sequence of YB1 was amplified from PC3 cDNA. PCR fragments were digested with HindIII and NcoI and ligated into the corresponding sites of pGL3-Promoter. The PRTE sequence at position +20-34 in the YB1 5′ UTR (UCSC kgID uc001chs.2) was mutated using the QuikChange Site-Directed Mutagenesis Kit following the manufacturer's protocol (Stratagene).

[0560] Ribosome Profiling.

[0561] PC3 cells were treated with rapamycin (50 nM) or PP242 (2.5 μM) for 3 hr. Cells were subsequently treated with cycloheximide (100 μg ml⁻¹) and detergent lysis was performed in the dish. The lysate was treated with DNase and clarified, and a sample was taken for RNA-seq analysis. Lysates were subjected to ribosome footprinting by nuclease treatment. Ribosome-protected fragments were purified, and deep sequencing libraries were generated from these fragments, as well as from poly(A) mRNA purified from non-nuclease-treated lysates. These libraries were analyzed by sequencing on an Illumina GAII.

[0562] Each sequencing run resulted in approximately 20-25 million raw reads per sample, of which 5-12 million unique reads were used for subsequent analysis. Ribosome footprint and RNA-seq sequencing reads were aligned against a library of transcripts from the UCSC Known Genes database GRCh37/hg19. The first 25 nucleotides of each read were aligned using Bowtie and this initial alignment was then extended to encompass the full fragment-derived portion of the sequencing read while excluding the linker sequence. Read density profiles were then constructed for the canonical transcript of each gene, using only reads with 0 or 1 total mismatches between the read sequence and the reference sequence, comprised of the transcript fragment followed by the linker sequence. Footprint reads were assigned to an A site nucleotide at position +15 to +17 of the alignment, based on the total fragment length; mRNA reads were assigned to the first nucleotide of the alignment. The average read density per codon was then computed for the coding sequence of each transcript, excluding the first 15 and last 5 codons, which can display atypical ribosome accumulation.

[0563] Average read density was used as a measure of mRNA abundance (RNA-seq reads) and of protein synthesis (ribosome profiling reads). For most analyses, genes were filtered to require at least 256 reads in the relevant RNA-seq samples. Translational efficiency was computed as the ratio of ribosome footprint read density to RNA-seq read density, scaled to normalize the translational efficiency of the median gene to 1.0 after excluding regulated genes (log₂ fold-change ±1.5 after normalizing for the all-gene median). Changes in protein synthesis, mRNA abundance and translational efficiency were similarly computed as the ratio of read densities between different samples, normalized to give the median gene a ratio of 1.0. This normalization corrects for differences in the absolute number of sequencing reads obtained for different libraries. 3,977 (replicate 1), and 5,333 (replicate 2) unique mRNAs passed a preset read threshold of 256 reads for single-gene quantification for all treatment conditions.

[0564] Western Blot Analysis.

[0565] Western blot analysis was performed as previously described (Hsieh et al., Cancer Cell 17:249-261 (2010)) with antibodies specific to phospho-AKT^{S473} (Cell Signaling), AKT (Cell Signaling), phospho-p70S6K^{T389} (Cell Signaling), phospho-rpS6^{S240/244} (Cell Signaling), rpS6 (Cell Signaling), phospho-4EBP1^{T37/46} (Cell Signaling), 4EBP1 (Cell Signaling), 4EBP2 (Cell Signaling), YB1 (Cell Signaling), CD44 (Cell Signaling), LEF1 (Cell Signaling), PTEN (Cell Signaling), eEF2 (Cell Signaling), GAPDH (Cell Signaling), vimentin (BD Biosciences), eIF4E (BD Biosciences), Flag (Sigma), β-actin (Sigma), MTA1 (Santa Cruz Biotechnology), Twist (Santa Cruz Biotechnology), rpL28 (Santa Cruz Biotechnology), HA (Covance) and rictor (Bethyl Laboratory).

[0566] qPCR Analysis.

[0567] RNA was isolated using the manufacturer's protocol for RNA extraction with TRIzol Reagent (Invitrogen) using the Pure Link RNA mini kit (Invitrogen). RNA was DNase-treated with Pure Link Dnase (Invitrogen). DNase-treated RNA was transcribed to cDNA with SuperScript III First-Strand Synthesis System for RT-PCR (Invitrogen), and 1 μl of cDNA was used to run a SYBR green detection qPCR assay (SYBR Green Supermix and MyiQ2, Biorad). Primers were used at 200 nM.

[0568] 5′ UTR Analysis.

[0569] 5′ UTRs of the 144 downregulated mTOR target genes were obtained using the known gene ID from the UCSC Genome Browser (GRCh37/hg19). Target versus non-target mRNAs were compared for 5′ UTR length, % G+C content and Gibbs free energy by the Wilcoxon two-sided test. Multiple Eₘ (expectation maximization) for Motif Elicitation (MEME) and Find Individual Motif Occurrences (FIMO) was used to derive the PRTE and determine its enrichment in the 144 mTOR-sensitive genes compared a background list of 3,000 genes. The Database of Transcriptional Start Sites (DBTSS Release 8.0) was used to identify putative 5′ TOP genes and putative transcription start sites in the 144 mTOR target genes.

[0570] Luciferase Assay.

[0571] PC3 4EBP1^{M} cells were treated with 1 μg ml⁻¹ doxycycline (Sigma) for 24 hr. Cells were transfected with various pGL3-Promoter constructs using lipofectamine 2000 (Invitrogen). After 24 hr, cells were collected. 20% of the cells were aliquoted for RNA isolation. The remaining cells were used for the luciferase assay per the manufacturer's protocol (Promega). Samples were measured for luciferase activity on a Glomax 96-well plate luminometer (Promega). Firefly luciferase activity was normalized to luciferase mRNA expression levels.

[0572] Kinase Assays.

[0573] mTOR activity was assayed using LanthaScreen Kinase kit reagents (Invitrogen) according to the manufacturer's protocol. PI(3)K α, β, γ, and δ activity were assayed using the PI(3)K HTRF assay kit (Millipore) according to the manufacturer's protocol. The concentration of ATP site inhibitor of mTOR necessary to achieve inhibition of enzyme activity by 50% (IC₅₀) was calculated using concentrations ranging from 20 μM to 0.1 nM (12-point curve). IC₅₀ values were determined using a nonlinear regression model (GraphPad Prism 5).

[0574] Cell Proliferation Assay.

[0575] PC3 cells were treated with the appropriate drug for 48 hr, and proliferation was measured using Cell Titer-Glo Luminescent reagent (Promega) per the manufacturer's protocol. The concentration of ATP site inhibitor of mTOR necessary to achieve inhibition of cell growth by 50% (IC₅₀) was calculated using concentrations ranging from 20.0 μM to 0.1 nM (12-point curve).

[0576] Mouse Xenograft Study.

[0577] Nude mice were inoculated subcutaneously in the right subscapular region with 5×10⁶ MDA-MB-361 cells. After tumors reached a size of 150-200 mm³, mice were randomly assigned into vehicle control or treatment groups. The ATP site inhibitor of mTOR was formulated in 5% polyvinylpropyline, 15% NMP, 80% water and administered by oral gavage at 0.3 mg kg⁻¹ and 1 mg kg⁻¹ daily.

[0578] Pharmacokinetic Analysis.

[0579] The area under the plasma drug concentration versus time curves, AUC₍₀₋ₜₗₐₛₜ₎ and AUC_{(0-inf)}, were calculated from concentration data using the linear trapezoidal rule. The terminal t_{1/2} in plasma was calculated from the elimination rate constant (lz), estimated as the slope of the log-linear terminal portion of the plasma concentration versus time curve, by linear regression analysis. The bioavailability (F) was calculated using F=AUC_{(0-tlast),po}D_{i.v.})/AUC_{(0-last),iv}D_{p.o.})×100%, where D_{i.v.} and D_{p.o.} are intravenous and oral doses, respectively. Cₘₐₓ was a highest drug concentration in plasma after oral administration. Tₘₐₓ was the time at which Cₘₐₓ is observed after extravascular administration of drug. Tₗₐₛₜ was the last time point a quantifiable drug concentration can be measured.

[0580] Polysome Analysis.

[0581] PC3 cells were treated for 3 hr with either DMSO or the ATP site inhibitor of mTOR (100 nM). Cells were re-suspended in PBS containing 100 μml⁻¹ cycloheximide (Sigma) and incubated on ice for 10 min. Cells were centrifuged at 300 g for 5 min at 4° C. and lysed in 10 mM Tris-HCl pH 8, 140 mM NaCl, 5 mM MgCl₂, 640 U ml⁻¹ Rnasin, 0.05% NP-40, 250 μg ml⁻¹ cycloheximide, 20 mM DTT, and protease inhibitors. Samples were incubated for 20 min on ice, then centrifuged once for 5 min at 3,300 g and once for 5 min at 9,300 g, isolating the supernatant after each centrifugation. Lysates were loaded onto 10-50% sucrose gradients containing 0.1 mg ml⁻¹ heparin and 2 mM DTT and centrifuged at 37,000 r.p.m. for 2.5 hr at 4° C. The sample was subsequently fractionated on a gradient fractionation system (ISCO). RNA was extracted from all fractions and run on a TBE-agarose gel to visualize 18S and 28S rRNA. Fractions 7-13 were found to correspond to the polysome fractions and were used for further qPCR analysis.

[0582] [³⁵S] Metabolic Labeling.

[0583] PC3 or PC3 4EBP1^{M} cells with or without indicated treatment were incubated with 30 μCi of [³⁵S]-methionine for 1 hr after pre-incubation in methionine-free DMEM (Invitrogen). Cells were prepared using a standard protein lysate protocol, resolved on a 10% SDS polyacrylamide gel and transferred onto a PVDF membrane (Bio-Rad). The membrane was exposed to autoradiography film (Denville) for 24 hr and developed.

[0584] Cell Cycle Analysis.

[0585] Appropriately treated PC3, BPH-1, or PC3-4EBP1^{M} cells were fixed in 70% ethanol overnight at −20° C. Cells were subsequently washed with PBS and treated with RNase (Roche) for 30 min. After this incubation, the cells were permeabilized and treated with 50 μg ml⁻¹ propidium iodide (Sigma) in a solution of 0.1% Tween, 0.1% sodium citrate. Cell cycle data was acquired using a BD FACS Caliber (BD Biosciences) and analyzed with FlowJo (v.9.1).

[0586] Apoptosis Analysis.

[0587] Appropriately treated LNCaP and A498 cells were labeled with Annexin V-FITC (BD Biosciences) and propidium iodide (Sigma) following the manufacturer's instructions. PI/Annexin data was acquired using a BD FACS Caliber (BD Biosciences) and analyzed with FlowJo (v.9.1).

[0588] Matrigel Invasion Assay.

[0589] BioCoat Matrigel Invasion Chambers (modified Boyden Chamber Assay; BD Biosciences) were used according to the manufacturer's instructions.

[0590] Real-Time Imaging of Cell Migration.

[0591] Real-time imaging of GFP-labeled PC3 cells was performed in poly-D-lysine-coated chamber cover glass slides (Lab-Tek). PC3 GFP cells were plated and allowed to adhere for 24 hr. Wells were wounded with a P200 pipette tip. The chamber slides were imaged with an IX81 Olympus wide-field fluorescence microscope equipped with a CO₂- and temperature-controlled chamber and time-lapse tracking system. Images from DIC and GFP channels were taken every 2 min and processed using ImageJ and analyzed for cell migration with Manual Tracking, using local maximum centering correction to maintain a centroid xy coordinate for each cell per frame over time. Tracking data was subsequently processed with the Chemotaxis and Migration tool from ibidi to create xy coordinate plots, velocity, and distance measurements.

[0592] Snail1 Immunocytochemistry.

[0593] Appropriately transfected or treated PC3 cells were plated on a poly-L-lysine-coated chamber slide (Lab-Tek) and cultured for 48 hr. Cells were fixed with 4% paraformaldehye (EMS), rinsed with PBS, and permeabilized with 0.1% Triton X-100. The samples were blocked in 5% goat serum and then incubated with anti-Snail1 antibody (Cell Signaling) in 5% goat serum for 2 hr at room temperature. Cells were washed with PBS and incubated with Alexa 594 anti-mouse antibody (Invitrogen) and DAPI (Invitrogen) for 2 hr at room temperature. Specimens were again washed with PBS and subsequently mounted with Aqua Poly/Mount (Polysciences). Image capture and quantification were completed as described below (see “Immunofluorescence”).

[0594] Cap-Binding Assay.

[0595] PC3 4EBP1^{M} cells were induced with doxycycline (1 μg ml⁻¹, Sigma) for 48 hr, then collected and lysed in buffer A (10 mM Tris-HCl pH 7.6, 150 mM KCl, 4 mM MgCl₂, 1 mM DTT, 1 mM EDTA, and protease inhibitors, supplemented with 1% NP-40). Cell lysates were incubated overnight at 4° C. with 50 ml of the mRNA cap analogue m⁷GTP-sepharose (GE Healthcare) in buffer A. The beads were washed with buffer A supplemented with 0.5% NP-40. Protein complexes were dissociated using 1× sample buffer, and resolved by SDS-PAGE and western blotted with the appropriate antibodies.

[0596] Pharmacological Treatment of Pten^{L/L} Mice and MRI Imaging.

[0597] Nine- and twelve-month-old Pten^{L/L} mice were gavaged daily with either vehicle (see “Mouse xenograft study”), RAD001 (10 mg kg⁻¹), or an ATP site inhibitor of mTOR (1 mg kg⁻¹) for the indicated times. Weight measurements were taken every 3 days to monitor for toxicity. For the 28-day study, mice were imaged via MRI at day 0 and day 28 in a 14-T GE MR scanner (GE Healthcare).

[0598] Prostate Tissue Processing.

[0599] Whole mouse prostates were removed from wild-type and Pten^{L/L} mice, microdissected, and frozen in liquid nitrogen. Frozen tissues were subsequently manually disassociated using a biopulverizer (Biospec) and additionally processed for protein and mRNA analysis as described above.

[0600] Immunofluorescence.

[0601] Prostates and lymph nodes were dissected from mice within 2 hr of the indicated treatment and fixed in 10% formalin overnight at 4° C. Tissues were subsequently dehydrated in ethanol (Sigma) at room temperature, mounted into paraffin blocks, and sectioned at 5 μm. Specimens were de-paraffinized and rehydrated using CitriSolv (Fisher) followed by serial ethanol washes. Antigen unmasking was performed on each section using Citrate pH 6 (Vector Labs) in a pressure cooker at 125° C. for 10-30 min. Sections were washed in distilled water followed by TBS washes. The sections were then incubated in 5% goat serum, 1% BSA in TBS for 1 hr at room temperature. Various primary antibodies were used, including those specific for keratin 5 (Covance), cytokeratin 8 (Abcam and Covance), YB1 (Abcam), vimentin (Abcam), MTA1 (Cell signaling), CD44 (BD Pharmingen), and the androgen receptor (Epitomics), which were diluted 1:50-1:500 in blocking solution and incubated on sections overnight at 4° C. Specimens were then washed in TBS and incubated with the appropriate Alexa 488 and 594 labeled secondary (Invitrogen) at 1:500 for 2 hr at room temperature, with the exception of YB1 which was incubated with biotinylated anti-rabbit secondary (Vector) followed by incubation with Alexa 594 labeled Streptavidin (Invitrogen). A final set of washes in TBS was completed at room temperature followed by mounting with DAPI Hardset Mounting Medium (Vector Lab). A Zeiss Spinning Disc confocal (Zeiss, CSU-X1) was used to image the sections at 40×-100×. Individual prostate cells were quantified for mean fluorescence intensity (m.f.i.) using the Axiovision (Zeiss, Release 4.8) densitometric tool.

[0602] Lymph Node Metastasis Measurements.

[0603] Mouse lymph nodes were processed as described above and stained for CK8 and androgen receptor. Lymph nodes were imaged using a Zeiss AX10 microscope. Metastases were identified and areas were measured using the Axiovision (Zeiss, Release 4.8) measurement tool.

[0604] Semi-Quantitative RT-PCR.

[0605] Whole prostates were removed from wild-type and Pten^{L/L} mice, microdissected, dissociated into single-cell suspension, and stained for epithelial cell markers as previously described (Lukacs et al., Nature Protocols 5:702-713 (2010)) using fluorescence-conjugated antibodies for CD49f, Sca-1, CD31, CD45, and Ter119 (BD Biosciences). Luminal epithelial cells were sorted using a FACS Aria (BD Biosciences). Cell pellets were resuspended in 500 μl TRIzol Reagent and RNA was isolated and transcribed into cDNA as described above. Semi-quantitative PCR analysis was performed using oligonucleotides for vimentin and β-actin at 200 nM in a 25 μl reaction with 12.5 μl GoTaq (Promega) for 32 and 33 cycles, respectively, which were within the linear range (FIG. 230.

[0606] Immunohistochemistry.

[0607] Immunohistochemistry was performed as described above (see “Immunofluorescence”) with the exception that immediately after antigen presentation and TBS washes, specimens were incubated in 3% hydrogen peroxide in TBS followed by TBS washes. The following primary antibodies were used: phospho-AKT^{S473} (Cell Signaling), phospho-rpS6^{S240/244} (Cell Signaling), phospho-4EBP1^{T37/46} (Cell Signaling), phospho-histone H3 (Upstate), and cleaved caspase (Cell Signaling). This was followed by TBS washes and incubation with the appropriate biotinylated secondary antibody (Vector Lab) for 30 min at room temperature. An ABC-HRP Kit (Vector Lab) was used to amplify the signal, followed by a brief incubation in hydrogen peroxide. The protein of interest was detected using DAB (Sigma). Specimens were counterstained with haematoxylin (Thermo Scientific), dehydrated with Citrisolv (Fisher), and mounted with Cytoseal XYL (Vector Lab).

[0608] Haematoxylin and Eosin Staining.

[0609] Paraffin-embedded prostate specimens were deparaffinized and rehydrated as described above (see “Immunofluorescence”), stained with haematoxylin (Thermo Scientific), and washed with water. This was followed by a brief incubation in differentiation RTU (VWR) and two washes with water followed by two 70% ethanol washes. The samples were then stained with eosin (Thermo Scientific) and dehydrated with ethanol followed by CitriSolv (Fisher). Slides were mounted with Cytoseal XYL (Richard Allan Scientific).

[0610] Oligonucleotides.

[0611] YB1 5′ UTR cloning and site-directed mutagenesis oligonucleotides are as follows. YB1 5′ UTR cloning: forward 5′-GCTACAAGCTTGGGCTTATCCCGCCT-3′ (SEQ ID NO:146), reverse 5′-TCGATCCATGGGGTTGCGGTGATGGT-3′ (SEQ ID NO:147); deletion (20-34): forward 5′-TGGGCTTATCCCGCCTGTCCTTCGATCGGTAGCGGGAGCG-3′ (SEQ ID NO:148), reverse 5′-CGCTCCCGCTACCGATCGAAGGACAGGCGGGATAAGCCCA-3′ (SEQ ID NO:149); transversion (20-34): forward 5′-TGGGCTTATCCCGCCTGTCCGCGGTAAGAGCGATCTTCGATCGGTAGCGGGAGCG-3′ (SEQ ID NO:150), reverse 5′-CGCTCCCGCTACCGATCGAAGATCGCTCTTACCGCGGACAGGCGGGATAAGCCCA-3′ (SEQ ID NO:151).

[0612] Human qPCR oligonucleotides are as follows. β-actin forward 5′-GCAAAGACCTGTACGCCAAC-3′ (SEQ ID NO:152), reverse 5′-AGTACTTGCGCTCAGGAGGA-3′ (SEQ ID NO:153); CD44 forward 5′-CAACAACACAAATGGCTGGT-3′ (SEQ ID NO:154), reverse 5′-CTGAGGTGTCTGTCTCTTTCATCT-3′ (SEQ ID NO:155); vimentin forward 5′-GGCCCAGCTGTAAGTTGGTA-3′ (SEQ ID NO:156), reverse 5′-GGAGCGAGAGTGGCAGAG-3′ (SEQ ID NO:157); Snail1 forward 5′-CACTATGCCGCGCTCTTTC-3′ (SEQ ID NO:158), reverse 5′-GCTGGAAGGTAAACTCTGGATTAGA-3′ (SEQ ID NO:159); YB1 forward 5′-TCGCCAAAGACAGCCTAGAGA-3′ (SEQ ID NO:160), reverse 5′-TCTGCGTCGGTAATTGAAGTTG-3′ (SEQ ID NO:161); MTA1 forward 5′-CAAAGTGGTGTGCTTCTACCG-3′ (SEQ ID NO:162), reverse 5′-CGGCCTTATAGCAGACTGACA-3′ (SEQ ID NO:163); PLAU forward 5′-TTGCTCACCACAACGACATT-3′ (SEQ ID NO:164), reverse 5′-GGCAGGCAGATGGTCTGTAT-3′ (SEQ ID NO:165); FGFBP1 forward 5′-ACTGGATCCGTGTGCTCAG-3′ (SEQ ID NO:166), reverse 5′-GAGCAGGGTGAGGCTACAGA-3′ (SEQ ID NO:167); ARID5B forward 5′-TGGACTCAACTTCAAAGACGTTC-3′ (SEQ ID NO:168), reverse 5′-ACGTTCGTTTCTTCCTCGTC-3′ (SEQ ID NO:169); CTGF forward 5′-CTCCTGCAGGCTAGAGAAGC-3′ (SEQ ID NO:170), reverse 5′-GATGCACTTTTTGCCCTTCTT-3′ (SEQ ID NO:171); RND3 forward 5′-AAAAACTGCGCTGCTCCAT-3′ (SEQ ID NO:172), reverse 5′-TCAAAACTGGCCGTGTAATTC-3′ (SEQ ID NO:173); KLF6 forward 5′-AAAGCTCCCACTTGAAAGCA-3′ (SEQ ID NO:174), reverse 5′-CCTTCCCATGAGCATCTGTAA-3′ (SEQ ID NO:175); BCL6 forward 5′-TTCCGCTACAAGGGCAAC-3′ (SEQ ID NO:176), reverse 5′-TGCAACGATAGGGTTTCTCA-3′ (SEQ ID NO:177); FOXA1 forward 5′-AGGGCTGGATGGTTGTATTG-3′ (SEQ ID NO:178), reverse 5′-ACCGGGACGGAGGAGTAG-3′ (SEQ ID NO:179); GDF15 forward 5′-CCGGATACTCACGCCAGA-3′ (SEQ ID NO:180), reverse 5′-AGAGATACGCAGGTGCAGGT-3′ (SEQ ID NO:181); HBP1 forward 5′-GCTGGTGGTGTTGTCGTG-3′ (SEQ ID NO:182), reverse 5′-CATGTTATGGTGCTCTGACTGC-3′ (SEQ ID NO:183); Twist1 forward 5′-CATCCTCACACCTCTGCATT-3′ (SEQ ID NO:184), reverse 5′-TTCCTTTCAGTGGCTGATTG-3′ (SEQ ID NO:185); LEF1 forward 5′-CCTTGGTGAACGAGTCTGAAATC-3′ (SEQ ID NO:186), reverse 5′-GAGGTTTGTGCTTGTCTGGC-3′ (SEQ ID NO:187); rpS19 forward 5′-GCTGGCCAAACATAAAGAGC-3′ (SEQ ID NO:188), reverse 5′-CTGGGTCTGACACCGTTTCT-3′ (SEQ ID NO:189); 5S rRNA forward 5′-GCCCGATCTCGTCTGATCT-3′ (SEQ ID NO:190), reverse 5′-AGCCTACAGCACCCGGTATT-3′ (SEQ ID NO:191); firefly luciferase forward 5′-AATCAAAGAGGCGAACTGTG-3′ (SEQ ID NO:192), reverse 5′-TTCGTCTTCGTCCCAGTAAG-3′ (SEQ ID NO:193).

[0613] Mouse qPCR oligonucleotides are as follows. β-actin forward 5′-CTAAGGCCAACCGTGAAAAG-3′ (SEQ ID NO:194), reverse 5′-ACCAGAGGCATACAGGGACA-3′ (SEQ ID NO:195); Yb1 forward 5′-GGGTTACAGACCACGATTCC-3′ (SEQ ID NO:196), reverse 5′-GGCGATACCGACGTTGAG-3′ (SEQ ID NO:197); vimentin forward 5′-TCCAGCAGCTTCCTGTAGGT-3′ (SEQ ID NO:198), reverse 5′-CCCTCACCTGTGAAGTGGAT-3′ (SEQ ID NO:199); Cd44 forward 5′-ACAGTACCTTACCCACCATG-3′ (SEQ ID NO:200), reverse 5′-GGATGAATCCTCGGAATTAC-3′ (SEQ ID NO:201); Mta1 forward 5′-AGTGCGCCTAATCCGTGGTG-3′ (SEQ ID NO:202), reverse 5′-CTGAGGATGAGAGCAGCTTTCG-3′ (SEQ ID NO:203).

[0614] siRNA/shRNA sequences are as follows. Control (D-001810-01) 5′-UGGUUUACAUGUCGACUAA-3′ (SEQ ID NO:204); vimentin (L-003551) 5′-UCACGAUGACCUUGAAUAA-3′ (SEQ ID NO:205), 5′-GGAAAUGGCUCGUCACCUU-3′ (SEQ ID NO:206), 5′-GAGGGAAACUAAUCUGGAU-3′ (SEQ ID NO:207), 5′-UUAAGACGGUUGAAACUAG-3′ (SEQ ID NO:208); YB1 (L-010213) 5′-CUGAGUAAAUGCCGGCUUA-3′ (SEQ ID NO:209), 5′-CGACGCAGACGCCCAGAAA-3′ (SEQ ID NO:210), 5′-GUAAGGAACGGAUAUGGUU-3′ (SEQ ID NO:211), 5′-GCGGAGGCAGCAAAUGUUA-3′ (SEQ ID NO:212); MTA1 (L-004127) 5′-UCACGGACAUUCAGCAAGA-3′ (SEQ ID NO:213), 5′-GGACCAAACCGCAGUAACA-3′ (SEQ ID NO:214), 5′-GCAUCUUGUUGGACAUAUU-3′ (SEQ ID NO:215), 5′-CCAGCAUCAUUGAGUACUA-3′ (SEQ ID NO:216); CD44 (L-009999) 5′-GAAUAUAACCUGCCGCUUU-3′ (SEQ ID NO:217), 5′-CAAGUGGACUCAACGGAGA-3′ (SEQ ID NO:218), 5′-CGAAGAAGGUGUGGGCAGA-3′ (SEQ ID NO:219), 5′-GAUCAACAGUGGCAAUGGA-3′ (SEQ ID NO:220); 4EBP1 (L-003005) 5′-CUGAUGGAGUGUCGGAACU-3′ (SEQ ID NO:221), 5′-CAUCUAUGACCGGAAAUUC-3′ (SEQ ID NO:222), 5′-GCAAUAGCCCAGAAGAUAA-3′ (SEQ ID NO:223), 5′-GAGAUGGACAUUUAAAGCA-3′ (SEQ ID NO:224); 4EBP2 (L-018671) 5′-GCAGCUACCUCAUGACUAU-3′ (SEQ ID NO:225), 5′-GGAGGAACUCGAAUCAUUU-3′ (SEQ ID NO:226), 5′-GCAAUUCUCCCAUGGCUCA-3′ (SEQ ID NO:227), 5′-UUGAACAACUUGAACAAUC-3′ (SEQ ID NO:228); rictor (LL-016984) 5′-GACACAAGCACUUCGAUUA-3′ (SEQ ID NO:229), 5′-GAAGAUUUAUUGAGUCCUA-3′ (SEQ ID NO:230), 5′-GCGAGCUGAUGUAGAAUUA-3′ (SEQ ID NO:231), 5′-GGGAAUACAACUCCAAAUA-3′ (SEQ ID NO:232); PTEN SH-003023-01-10 5′-GCTAAGAGAGGTTTCCGAA-3′ (SEQ ID NO:233), SH-003023-02-10 5′-AGACTGATGTGTATACGTA-3′ (SEQ ID NO:234).

### Example 7

### Effect of mTOR and MEK Inhibitors on Translation Efficiency

[0615] To further examine the effect of mTOR inhibitors on translational efficiency in PC3 prostate cancer cells, the ATP site inhibitor of mTOR PP242 was compared to the allosteric inhibitor of mTOR, rapamycin and to another ATP site inhibitor. FIG. 26 shows a representative comparison of change in translational efficiency versus DMSO control by the allosteric mTOR inhibitor rapamycin and the ATP site inhibitor PP242 (FIG. 26A) and the two ATP site inhibitors INK128 (100 nM) and PP242 (as described in Example 6) (FIG. 26B). Each data point represents a single gene. Data points highlighted in red have statistically significant changes in translational efficiency versus DMSO control as described herein. FIG. 26A shows that most of the genes where translational efficiency decreases due to PP242 also have decreased translational efficiencies caused by rapamycin; however, the magnitude of rapamycin decrease is substantially less than with PP242. In contrast, treatment with INK128 not only impacts the same gene set as PP242, but also has approximately the same magnitude of change on a gene by gene basis (FIG. 26B). This experiment shows that two different drugs that act on a target through the same mechanism (such as PP242 and INK128) will affect translational efficiency in a similar manner—that is, the methods of this disclosure can be used to find active compounds that are pharmacological “mimics” of each other. Even when two compounds have different mechanisms of action on the same target (such as PP242 and rapamycin), effects on translational efficiency can be detected although the degree of the translational effect may be different.

[0616] The following experiment was performed to show that translational profiling can be used for a variety of agents and targets. The mTOR inhibitors alter the PI3K/AKT pathway. Here, a MEK/ERK pathway inhibitor (GSK212) was examined.

[0617] Cell Culture.

[0618] SW620 human colon cancer cells were cultured in DMEM media supplemented with penicillin G (100 U/ml), streptomycin (100 μg/ml), and 10% FBS in a humidified atmosphere of 5% CO₂ maintained at 37° C.

[0619] MEK and mTOR Inhibitor Treatment.

[0620] SW620 cells (ATCC, passage 12) were seeded at about 75% confluence 24 hrs prior to drug treatment. The following day, cells were treated with either DMSO (vehicle control) or MEK inhibitor GSK-11202012 (referred to herein as “GSK212”) at 250 nM for 8 hrs or with either DMSO or the mTOR inhibitor PP242 at 2.5 μM for 3 hrs. About 6×10⁶ cells/10 cm plate and about 1×10⁶ cells/well of a 6-well plate were harvested for ribosome profiling and Western blot analysis, respectively, following drug treatment.

[0621] Western Blot Analysis.

[0622] Cells were washed with PBS and lysed in 1× cell lysis buffer (Cell Signaling) for 15 min at 4° C. Lysates were sonicated briefly, clarified by centrifugation for 15 min at 14,000 rpm, and supernatants were then collected. Protein concentration in the soluble fraction was determined by BCA protein assay (Thermo Scientific). A 4-20% Bis-Tris gradient gel (Invitrogen) was used to resolve 20 μg of protein and transferred to nitrocellulose membrane. The resulting membranes were blocked for 1 hr at room temperature with Odyssey blocking solution (LI-COR) and then incubated with primary antibodies at 4° C. overnight. The following day, the blots were washed 3 times, 10 min each in TBST, and incubated with IR-conjugated goat anti-rabbit IgG secondary antibody (IRDye 800 CW at 1:20,000; LI-COR) for 1 hour at room temperature. The blots were then washed, scanned, and specific proteins were detected using the LI-COR Odyssey infrared imager. The following antibodies from Cell Signaling were used at 1:1000 dilution: anti-phospho-eIF4E(Ser209)(#9741), anti-phospho-rpS6(Ser235/236)(#4858), anti-phospho-ERK1/2(Thr202/Tyr204)(#4370), anti-phospho-p70S6K(Thr421/Ser424)(#9204), anti-phospho-p90RSK(Thr359/Ser363)(#9344), anti-phospho-4EBP(Ser65), anti-phospho-pAKT(Ser473), anti-phospho-eIF4E(Ser209), and anti-β-actin (#4970). Actin was used as a loading amount control.

mTOR Inhibitor PP242 and MEK Inhibitor GSK212 are Clearly Distinguishable by Differential Effects on Translational Efficiencies.

[0623] GSK212 is a very potent and selective MEK inhibitor with IC₅₀ values of about 1 nM for both MEK1 and MEK2. The potency of GSK212 in 72 hour proliferation assays on SW620 cells is 20-30 nM (data not shown). In this concentration range, GSK212 has profound effects on the transcriptional program of sensitive cells like SW620. In the experiments described herein, exposure to SW620 cells was at a supra-therapeutic concentration (250 nM) for 8 hours. No evidence of inhibition of proliferation or induction of apoptosis was apparent over this time frame. Phosphorylation of ERK and p90RSK in SW620 cells was completely inhibited (FIG. 27A). At this concentration, only partial inhibition of the phosphorylation of the ribosomal protein S6 (rpS6) and its canonical kinase S6K (p70RSK) was achieved. Similarly, partial inhibition of the phosphorylation of eIF4E was observed (FIG. 27A). When used at concentrations relevant for MEK inhibition (e.g., at 25 nM to 100 nM), little or no effect on phosphorylation of S6, eIF4E and 4EBP1 was detectable (data not shown).

[0624] SW620 cells are less sensitive to inhibition by PP242 than are PC3 cells. At 2.5 μM PP242, phosphorylation of S6K, S6 and 4EBP1 was substantially inhibited in PC3 cells (FIG. 27B). The inhibitor is less potent in SW620 cells, such that some phosphorylation of 4EBP was observed even at 10 μM (FIG. 27B). From the dose response shown in this figure, it is nonetheless clear that significant inhibition of phosphorylation could be achieved with 2.5 μM PP242.

[0625] As is apparent in FIG. 27, treatment of SW620 cells with the MEK inhibitor and with the mTOR inhibitor have distinctly different impacts on the phosphorylation state of important components of the translational machinery, most notably 4EBP1. A corresponding difference on the translation efficiencies of mRNAs that are strongly dependent on the levels of free eIF4E was confirmed by comparing the effects of 250 nM GSK212 and 2.5 μM PP242 in SW620 cells (FIG. 26C). First, most genes shown to be sensitive to 2.5 μM PP242 in PC3 cells (data points in red) are also sensitive in SW620 cells. Second, with only three exceptions, treatment with the MEK inhibitor has little or no effect on the translational efficiencies of these genes. This further demonstrates the ability of translational efficiency measurements to distinguish between drugs and drug mechanisms of action.

Characteristic Transcriptional Gene Signature of MEK Inhibitor GSK212 can be Observed in Translational Rates as Distinct from Translational Efficiencies.

[0626] A signature for MEK inhibition in cells sensitive to these agents as determined by microarray analysis has been described previously (Pratilas et al., Proc. Nat'l Acad. Sci. U.S.A. 105: 4519, 2009). This signature was compared with signatures derived from RNA-seq and transcriptional profiling of GSK212 on SW620 cells, as provided in Table 8. There is general agreement between the published signature and the signatures observed both in transcription (RNA) and in translational rates (RPF). The strong concordance between signatures from transcription and translational rate in this setting corresponds to the MEK signature that was originally identified and is associated with robust transcriptional changes which, for the most part, are reflected in changes in translational rate.

TABLE 8
Transcriptional, translational rate, and translational efficiency signatures of
MEK inhibitor on SW620 cells

| PNAS ID/ | | | | PNAS | Profile | | |
|---|---|---|---|---|---|---|---|
| HGNC ID | SEQ ID NO | ENSEMBL ID | Description | rna | rna | rpf | TE |
| ALF/ | 235 | ENSG00000242441 | general transcription factor Iia, | 2.7 | NA | NA | NA |
| GTF2A1L | | | 1-like | | | | |
| SEMA6A/ | 236 | ENSG00000092421 | semaphorin 6A | 2.1 | 2.3 | 0.7 | −1.5 |
| SEMA6A | | | | | | | |
| HYDIN/ | 237 | ENSG00000157423 | hydrocephalus inducing | 2.1 | mInf | Inf | Inf |
| HYDIN | | | | | | | |
| KIR3DL2/ | 238 | ENSG00000240403 | killer cell immunoglobulin-like | 1.7 | NA | NA | NA |
| KIR3DL2 | | | receptor, three domains, long | | | | |
| | | | cytoplasmic tail, 2 | | | | |
| BYSL/ | 239 | ENSG00000112578 | bystin-like | −1.2 | −0.8 | −0.6 | 0.2 |
| BYSL | | | | | | | |
| ELOVL6/ | 240 | ENSG00000170522 | ELOVL family member 6, | −1.5 | −1.4 | −0.8 | 0.6 |
| ELOVL6 | | | elongation of long chain fatty | | | | |
| | | | acids-like 6 | | | | |
| SLC1A5/ | 241 | ENSG00000105281 | solute carrier family 1 (neutral | −1.2 | −0.1 | −0.5 | −0.3 |
| SLC1A5 | | | amino acid transporter), member | | | | |
| | | | 5 | | | | |
| CHSY1/ | 242 | ENSG00000131873 | carbohydrate (chondroitin) | −1.3 | 0.0 | −0.7 | −0.7 |
| CHSY1 | | | synthase 1 | | | | |
| IL8/ | 243 | ENSG00000169429 | interleukin 8 | −2.5 | −5.6 | −3.2 | 2.4 |
| IL8 | | | | | | | |
| FOS/ | 244 | ENSG00000170345 | v-fos FBJ murine osteosarcoma | −3.4 | −2.9 | −2.7 | 0.2 |
| FOS | | | viral oncogene homolog | | | | |
| B4GALT6/ | 245 | ENSG00000118276 | UDP-Gal:betaGlcNAc beta 1,4- | −1.7 | 0.0 | −0.1 | 0.0 |
| B4GALT6 | | | galactosyltransferase, | | | | |
| | | | polypeptide 6 | | | | |
| CCND1/ | 246 | ENSG00000110092 | cyclin D1 (PRAD1: parathyroid | −2.2 | −1.8 | −2.0 | −0.3 |
| CCND1 | | | adenomatosis 1) | | | | |
| ETV5/ | 247 | ENSG00000244405 | ets variant gene 5 (ets-related | −1.7 | −2.6 | −5.6 | −3.0 |
| ETV5 | | | molecule) | | | | |
| ETV4/ | 248 | ENSG00000175832 | ets variant gene 4 (E1A enhancer | −2.2 | −2.2 | −2.8 | −0.6 |
| ETV4 | | | binding protein, E1AF) | | | | |
| SLC4A7/ | 249 | ENSG00000033867 | solute carrier family 4, sodium | −1.6 | −0.2 | −1.1 | −0.9 |
| SLC4A7 | | | bicarbonate cotransporter, | | | | |
| | | | member 7 | | | | |
| ETV1/ | 250 | ENSG00000006468 | ets variant gene 1 | −2.6 | −3.5 | mInf | mInf |
| ETV1 | | | | | | | |
| MAFF/ | 251 | ENSG00000185022 | v-maf musculoaponeurotic | −2.7 | −1.7 | −1.1 | 0.6 |
| MAFF | | | fibrosarcoma oncogene homolog | | | | |
| | | | F (avian) | | | | |
| IER3/ | 252 | ENSG00000137331 | immediate early response 3 | −3.3 | −2.2 | −2.3 | −0.1 |
| IER3 | | | | | | | |
| LIF/ | 253 | ENSG00000128342 | leukemia inhibitory factor | −3.2 | −1.7 | −0.9 | 0.9 |
| LIF | | | (cholinergic differentiation | | | | |
| | | | factor) | | | | |
| SPRY4/ | 254 | ENSG00000187678 | sprouty homolog 4 (Drosophila) | −2.6 | −5.2 | −7.1 | −2.0 |
| SPRY4 | | | | | | | |
| DUSP4/ | 255 | ENSG00000120875 | dual specificity phosphatase 4 | −2.2 | −2.0 | −2.4 | −0.4 |
| DUSP4 | | | | | | | |
| LNK/ | 256 | ENSG00000111252 | SH2B adaptor protein 3 | −2.0 | 0.2 | −0.7 | −0.9 |
| SH2B3 | | | | | | | |
| GPR3/ | 257 | ENSG00000181773 | G protein-coupled receptor 3 | −2.1 | mInf | −2.8 | Inf |
| GPR3 | | | | | | | |
| TNC/ | 258 | ENSG00000041982 | tenascin C (hexabrachion) | −2.5 | 1.1 | −0.5 | −1.6 |
| TNC | | | | | | | |
| POLR3G/ | 259 | ENSG00000113356 | polymerase (RNA) III (DNA | 1.0 | −0.7 | −0.8 | −0.1 |
| POLR3G | | | directed) polypeptide G (32kD) | | | | |
| WDR3/ | 260 | ENSG00000065183 | WD repeat domain 3 | −1.1 | 0.0 | −1.0 | −1.0 |
| WDR3 | | | | | | | |
| BXDC2/ | 261 | ENSG00000113460 | brix domain containing 2 | −1.2 | −1.1 | −0.8 | 0.2 |
| BRIX1 | | | | | | | |
| CD3EAP/ | 262 | ENSG00000117877 | CD3E antigen, epsilon | −1.4 | −0.6 | −1.1 | −0.5 |
| CD3EAP | | | polypeptide associated protein | | | | |
| EGR1/ | 263 | ENSG00000120738 | early growth response 1 | −2.1 | −1.0 | −4.1 | −3.1 |
| EGR1 | | | | | | | |
| PHLDA2/ | 264 | ENSG00000181649 | pleckstrin homology-like | −2.2 | −2.1 | −1.1 | 1.1 |
| PHLDA2 | | | domain, family A, member 2 | | | | |
| ARID5A/ | 265 | ENSG00000196843 | AT rich interactive domain 5A | −1.7 | −0.5 | −0.9 | −0.4 |
| ARID5A | | | (MRF1-like) | | | | |
| DUSP6/ | 266 | ENSG00000139318 | dual specificity phosphatase 6 | −2.6 | −6.3 | −9.3 | −3.1 |
| DUSP6 | | | | | | | |
| SPRY2/ | 267 | ENSG00000136158 | sprouty homolog 2 (Drosophila) | −4.0 | −1.7 | −1.3 | 0.4 |
| SPRY2 | | | | | | | |
| DDX21/ | 268 | ENSG00000165732 | DEAD (Asp-Glu-Ala-Asp) (SEQ | −1.1 | −0.3 | −1.0 | −0.6 |
| DDX21 | | | ID NO: 287) box polypeptide 21 | | | | |
| GTPBP4/ | 269 | ENSG00000107937 | GTP binding protein 4 | −1.1 | −0.4 | −0.7 | −0.3 |
| GTPBP4 | | | | | | | |
| PPAT/ | 270 | ENSG00000128059 | phosphoribosyl pyrophosphate | −1.1 | −0.4 | −0.7 | −0.3 |
| PPAT | | | amidotransferase | | | | |
| HSPC111/ | 271 | ENSG00000048162 | hypothetical protein HSPC111 | −1.3 | −1.5 | −0.9 | 0.6 |
| NOP16 | | | | | | | |
| MYC/ | 272 | ENSG00000136997 | v-myc myelocytomatosis viral | −2.4 | −1.3 | −1.6 | −0.3 |
| MYC | | | oncogene homolog (avian) | | | | |
| MAP2K3/ | 273 | ENSG00000034152 | mitogen-activated protein kinase | −1.5 | −1.6 | −0.6 | 1.0 |
| MAP2K3 | | | kinase 3 | | | | |
| GNL3/ | 274 | ENSG00000163938 | guanine nucleotide binding | −1.0 | −0.7 | −0.8 | −0.2 |
| GNL3 | | | protein-like 3 (nucleolar) | | | | |
| RRS1/ | 275 | ENSG00000179041 | RRS1 ribosome biogenesis | −1.8 | −0.9 | −0.8 | 0.1 |
| RRS1 | | | regulator homolog (S. cerevisiae) | | | | |
| FOSL1/ | 276 | ENSG00000175592 | FOS-like antigen 1 | −4.2 | −3.6 | −4.1 | −0.5 |
| FOSL1 | | | | | | | |
| FLJ10534/ | 277 | ENSG00000167721 | TSR1 20S rRNA accumulation | −1.1 | −0.3 | −0.8 | −0.6 |
| TSR1 | | | homolog (S. cerevisiae) | | | | |
| SPRED2/ | 278 | ENSG00000198369 | sprouty-related, EVH1 domain | −1.0 | −2.1 | −3.5 | −1.3 |
| SPRED2 | | | containing 2 | | | | |
| HMGA2/ | 279 | ENSG00000149948 | high mobility group AT-hook 2 | −1.6 | −2.9 | −1.7 | 1.2 |
| HMGA2 | | | | | | | |
| PLK3/ | 280 | ENSG00000173846 | polo-like kinase 3 (Drosophila) | −2.3 | −3.1 | −2.4 | 0.7 |
| PLK3 | | | | | | | |
| YRDC/ | 281 | ENSG00000196449 | yrdC domain containing (E. coli) | −1.2 | −0.7 | −0.6 | 0.1 |
| YRDC | | | | | | | |
| POLR1C/ | 282 | ENSG00000171453 | polymerase (RNA) I polypeptide | −1.0 | −0.8 | −0.6 | 0.2 |
| POLR1C | | | C, 30kDa | | | | |
| PPAN/ | 283 | ENSG00000130810 | peter pan homolog (Drosophila) | −1.2 | −0.4 | −1.1 | −0.7 |
| PPAN | | | | | | | |
| PYCRL/ | 284 | ENSG00000104524 | pyrroline-5-carboxylate | −2.6 | −0.2 | 0.0 | 0.1 |
| PYCRL | | | reductase-like | | | | |
| GEMIN4/ | 285 | ENSG00000179409 | gem (nuclear organelle) | −1.2 | −0.1 | −0.6 | −0.5 |
| GEMIN4 | | | associated protein 4 | | | | |
| TNFRSF12A/ | 286 | ENSG00000006327 | tumor necrosis factor receptor | −1.5 | −2.2 | −2.0 | 0.2 |
| TNFRSF12A | | | superfamily, member 12A | | | | |

For Table 8: The transcriptional signature of V600E-BRAF tumor cells treated with MEK inhibitor PD0325901 is compared with the transcriptional, translational, and translational efficiency signatures of SW620 cells treated with the MEK inhibitor GSK212. The depicted gene set and data for V600E-BRAF tumor cells are adapted from Table S2 of V600E-BRAF is associated with disabled feedback inhibition of RAF-MEK signaling and elevated transcriptional output of the pathway (Pratilas et al., 2009). Any gene where the value for the GSK212 treated sample is 0 is shown as “mInf” (log₂(0/x) = −infinity) for the log₂ fold-change value. Any gene where the value for the DMSO sample is 0 is shown as “Inf” (log₂(x/0) = infinity) for the log₂ fold-change value. All values are log₂ MEKi/DMSO. Any gene where data is unavailable in the ribosomal profiling experiment is shown as “NA.”

Unique Insights into MEK Inhibition are Nonetheless Apparent in Translational Efficiencies.

[0627] In contrast to solely translation rate, examination of the translational efficiencies of the mRNAs that make up the MEK signature indicates a set of gene products that may have unique importance. Protein synthesis from some mRNAs, such as those from BYSL, DUSP4 and POLR3G, was almost exclusively transcriptionally mediated and accordingly had translational efficiency changes near zero. In contrast, mRNAs from genes like ETV5 and SPRY4, which are transcriptionally down-regulated, had the production of their corresponding proteins further inhibited at the translational level leading to profound control. Conversely, production of the mRNA from the IL8, PHLDA2 and MAP2K3 genes are examples where synthesis is less inhibited (despite transcriptional data) due to an offsetting increase in translational efficiency, such as a counter-regulation. In addition to genes involved in the MEK signature, there were a number of other genes in SW620 cells that had changes in translational efficiency associated with MEK inhibition (data not shown). In any case, such genes having translational efficiency or a combination of translational efficiency and transcription control are of interest as therapeutic targets or for use in examining the action of different therapeutic agents (e.g., such as mimic action).

### Example 8

### Translational Profiling of a Fibrotic Disease Cell Model

[0628] TGFβ-mediated transformation of fibroblasts is well-established as an essential step in fibroplasia, a key component of many fibrotic disorders (Blobe et al., N. Engl. J. Med. 342:1350, 2000; Border and Noble, N. Engl. J. Med. 331:1286, 1994). As described in this Example, analysis of changes in translational efficiencies reveals disease-associated cellular changes accompanying this transformation. For example, co-administration of TGF-β with an inhibitor of a PI3K/Akt/mTOR pathway enzyme (“PAMi”) reverses or prevents the changes observed in a fibrotic disorder-related pathway (i.e., normalizes the translational efficiencies of the genes) and inhibits increased production of fibrotic disorder biomarker proteins, type 1 procollagen and α-actin (which are both hallmarks of TGF-β-mediated fibroblast transformation to myofibroblasts). Although these biomarkers are only affected at the transcriptional level and not the translational level, they nonetheless provide a means to monitor the pathogenic state of the cell that is mediated by other fibrosis-related genes that are affected at the translational level.

[0629] Cell Culture.

[0630] Normal human lung fibroblasts (Lonza #CC-2512) were cultured in DMEM+10% FBS supplemented with Penicillin, Streptomycin and Glutamax (Invitrogen) at 37° C. in a humidified incubator with 5% CO₂. Cell passage numbers 2 through 5 were used for all experiments.

[0631] Fibroblast Transformation and Treatment.

[0632] On Day 0, fibroblasts were seeded and cultured under normal conditions overnight. On Day 1, media was removed, cells were washed with PBS and then incubated for 48 hrs in serum free media (DMEM supplemented with penicillin, streptomycin, and glutamax). On Day 3, media was removed and cells were cultured for 24 hrs with fresh serum free media ±PAMi and ±10 ng/ml TGF-β. After this 24 hour incubation, about 6×10⁶ cells/10 cm plate and about 1×10⁶ cells/well of a 6-well plate were used for ribosomal profiling and western blot analysis, respectively.

[0633] Ribosomal Profiling.

[0634] Cells were washed with cold PBS supplemented with cycloheximide and lysed with 1× mammalian lysis buffer for 10 min on ice. Lysates were clarified by centrifugation for 10 min at 14,000 rpm and supernatants were collected. Cell lysates were processed to generate the ribosomal protected fragments and total mRNA according to the instructions included with the ARTseq Ribosome Profiling Kit. Sequencing of total RNA (RNA) and of ribosome-protected fragments of RNA (RPF) was carried out with standard Illumina rna seq methodology.

[0635] Bioinformatics Analysis.

[0636] RNA-seq reads were processed with tools from the FASTX-Toolkit (fastq_quality_trimmer, fastx_clipper and fastx_trimmer). Unprocessed and processed reads were evaluated for a variety of quality measures using FastQC. Processed reads were mapped to the human genome using Tophat. Gene-by-gene assessment of the number of fragments strictly and uniquely mapping to the coding region of each gene was conducted using HTSeq-count, a component of the HTSeq package. Differential analyses of the transforming effect of TGF-β on fibroblasts and effect of PAMi treatment on this transformation were carried out with the software packages DESeq for transcription (RNA counts) and translational rate (RPF counts) and BABEL for translational efficiency based upon ribosomal occupancy as a function of RNA level (RNA and RPF counts). Genes with low counts in either RPF or RNA were excluded from differential analyses. Pathway and network analyses of differential data was conducted using Ingenuity Pathway Analysis (IPA).

[0637] Western Blot Analysis.

[0638] Cells were washed with PBS and lysed in 1× cell lysis buffer (Cell Signaling) for 15 min at 4° C. Lysates were sonicated briefly and clarified by centrifugation for 15 min at 14,000 rpm and supernatants were collected. Protein concentration in the soluble fraction was determined by BCA protein assay (Thermo Scientific). Samples of protein (20 μg) were resolved on 4-20% Bis-Tris gradient gel (Invitrogen) and transferred to nitrocellulose membrane. The resulting blots were blocked for 1 hr at room temperature with Odyssey blocking solution (LI-COR) and then incubated with primary antibodies at 4° C. overnight. The following day, the blots were washed 3 times, 10 min each in TBST, and incubated with goat anti-rabbit fluorescent conjugated secondary antibody (IRDye 800 CW at 1:20,000; LI-COR) for 1 hour at room temperature. The blots were then washed and scanned, specific proteins were detected by using the LI-COR Odyssey infrared imager. The following antibodies were used at 1:1000 dilution from Sigma (α-actin #A2547) and Cell Signaling: anti-phospho-4EBP(Ser65), anti-phospho-rpS6(Ser235/236)(#4858), anti-phospho-ERK1/2(Thr202/Tyr204)(#4370), anti-phospho-p70S6K(Thr421/Ser424)(#9204), anti-phospho-pAKT(Ser473), anti-phospho-MNK(Thr197/202), anti-α-actin (#4970).

[0639] Procollagen Type 1 Analysis.

[0640] Culture Media was collected, centrifuged to pellet cellular debris, and stored at −80° C. Procollagen Type 1 C-Peptide (PIPC) was quantified using the (PIP) EIA kit (Clontech Cat# MK101) according to manufacturer's instructions.

### PI3K/Akt/mTORi Co-Administration Prevents Transformation of Fibroblasts to Myofibroblasts by TGFβ.

[0641] Transformation of fibroblasts to myofibroblasts by treatment with TGF-β for 24 hours was accompanied by an approximately 7-fold increase in procollagen production, while treatment with a PAMi was able to block this increase (EC₅₀ of about 0.2 μM) (FIG. 28). Expression of TGF-β induced myofibroblast differentiation marker, smooth muscle actin (α-SMA), was also analyzed by Western blot analysis (FIG. 29). After 24 hours of TGF-β stimulation, increased α-SMA protein levels were detected, while the level of β-actin did not change. As with procollagen, co-incubation of the cells with a PAMi maintained the α-SMA protein at pretreatment levels. Ribosomal profiling showed that the effect of the PAMi on both procollagen and α-SMA were a consequence of preventing fibroblast transformation and transcriptional regulation (instead of a decrease in translation efficiency of mRNA to protein). Specifically, the translational efficiencies of the procollagen and α-SMA were essentially independent of TGF-β and PAMi treatment.

[0642] TGF-β-dependent activation of the PI3K/Akt/mTOR and ERK pathways were also examined by Western blot analysis (FIG. 29). Western analysis also indicates that TGF-β stimulated phosphorylation of AKT, 4EBP, S6K, S6 in the mTOR pathway and modestly increased the phosphorylation of ERK. Co-incubation of cells with the PAMi abolished TGF-β-dependent increases in phosphorylation of AKT, 4EBP, S6K, and S6 at 0.625 μM, as well as decreasing the α-SMA protein to pretreatment levels.

[0643] Ribosomal profiling was used to measure changes in transcription and translation on a genome-wide basis accompanying TGF-β-dependent transformation of fibroblasts to myofibroblasts. This system is known to be driven in large part by transcriptional activation, and changes in translational rate and RNA levels on a genome-wide level were highly correlated (see FIG. 30). In contrast, changes in translational efficiency were relatively independent of transcriptional and translational rate changes. Thus, in this case, measurements of translational efficiency provide a unique window into cellular biology of fibrotic disorders. Correspondingly, the outcome of pathway analysis based on gene identification via changes in translational efficiency upon TGF-β treatment is quite distinct from analyses based on transcription or translational rate. These three gene signatures were analyzed for pathway and network connections using Ingenuity Pathway Analysis (IPA). Some characteristics of these gene lists, including the identity of the pathway with the highest statistical association for each signature, are listed in Table 9 (while these are the most significant, it should be noted that significant association of these gene lists with other pathways were observed). Most notably, genes showing changes in RNA levels and translational rates were most strongly associated with Hepatic Fibrosis/Hepatic Stellate Cell Activation (see FIGS. 31 and 32). This action of TGF-β in fibroblasts recapitulates much of the behavior observed in liver fibrosis.

TABLE 9
Properties of Fibrotic Disorder
Gene Signatures from IPA Analysis

| | | RPF | |
|---|---|---|---|
| | RNA | (Translational | Translational |
| | (Transcriptome) | Rate) | Efficiency |
| p-value | 0.1 | 0.05 | 0.05 |
| threshold | | | |
| for | | | |
| differential | | | |
| # genes | 194 | 211 | 238 |
| meeting | | | |
| threshold | | | |
| % of total gene set | 4.20% | 4.50% | 5.10% |
| Most | Hepatic Fibrosis/ | Hepatic Fibrosis/ | Unique |
| significant | Hepatic Stellate | Hepatic Stellate | Fibrosis- |
| pathway/ | Cell Activation | Cell Activation | Associated |
| category | | | Pathway |
| from IPA | | | |
| analysis | | | |

[0644] In contrast, the gene signature showing changes in translational efficiency was most strongly associated with regulation of a pathway not previously observed to be associated with fibrotic disorders. All genes identified in this new pathway showed a significant increase in translational efficiency (TE) (FIG. 33), which extends far beyond these few genes. For example, 118 of the 141 genes in the pathway evaluated in this study move in concert, having an increase in translational efficiency (FIG. 34, panel A). The translational efficiencies of the 141 pathway-associated genes in fibroblasts before treatment with TGF-β (which induces a fibrotic-disease type condition) were low (mean value −1.70 log 2 relative to population mean); the impact of TGF-β induced transformation was to increase the translational efficiency of many genes in this signature (mean value of signature upon TGF-β treatment was −1.05). Nonetheless, this was still 2-fold lower than the overall population and indicates this pathway is a bottleneck in cellular transformation. For the subset of 12 genes described previously, 11 of 12 move toward the untransformed, normal state after treatment with PAMi (FIG. 33). The mean increase in translational efficiency by TGF-β in these 12 genes is 1.3 log 2; the presence of PAMi decreases this value to only 0.4 log 2. Similar results are seen for all genes in the pathway (FIG. 34), wherein 104 of 141 genes move toward normal. The mean increase in translational efficiency by TGF-β in these 12 genes was 0.65 log 2; the presence of PAMi decreases this value to only 0.09 log 2. Clearly, the presence of PAMi maintains the translational efficiencies of the genes in fibrotic disorder-associated pathway at their normal state in fibroblasts. Normalization of this pathway by PAMi is due to substantially inhibiting TGF-β induced transformation of fibroblasts to fibrotic myofibroblasts.

[0645] Conclusion.

[0646] Comparison of translational efficiencies between the normal, healthy state (fibroblasts) and pathogenic state (fibrotic myofibroblasts induced by TGFβ treatment) identified a novel pathway previously not associated with fibrosis, which is a novel insight into a key role of translational efficiency in the pathogenesis of fibrotic disease. Further, a PAMi agent that modulates this fibrotic disorder-associated pathway and prevents TGF-β-mediated fibroblast to myofibroblast transformation confirms the association of this pathway with fibrotic disease and, thus, shows that components and regulators of this pathway are new targets. The methods of the instant disclosure show that new gene signatures having altered translational profiles (e.g., altered translational efficiency) may be identified using such methods. Furthermore, these data show that an agent or therapeutic that normalizes a translational profile may also be identified. Finally, these data show that targets not previously validated for a particular disorder (in this case, fibrosis), can be identified and validated using the methods of this disclosure.

### Example 9

### Translational Profiling of a Neurodevelopmental Disease Model

[0647] An exemplary neurodevelopmental disease or disorder is Fragile X syndrome, which is caused by a redundant trinucleotide (CGG) repeat in the 5′ UTR of the fragile X mental retardation 1 gene (FMR1). This causes silencing of the FMR1 gene at the transcriptional level and results in the lack of fragile X mental retardation 1 protein (FMRP) expression. FMRP is a cytoplasmic RNA binding protein that associates with polyribosomes as part of a large ribonucleoprotein complex and acts as a negative regulator of translation. Hence, FMRP is thought to regulate the translation of specific mRNAs that are critical for correct development of neurons and synaptic function. The Fragile X syndrome is directly linked to this lack of FMRP expression or loss of FMRP function (i.e., loss of translational control). Indeed, Fmr1 knockout mice have abnormal dendritic spines, which are thought to be the basis of the disease associated mental retardation (see, e.g., Darnell et al., Cell 146: 247, 2011).

[0648] Cell Culture.

[0649] SH-SY5Y human neuroblastoma cells were cultured in F12/DMEM media (1:1 ratio) supplemented with penicillin G (100 U/ml), streptomycin (100 μg/ml), and 10% FBS. HEK293 human embryonic fibroblasts were cultured in DMEM media supplemented with penicillin G (100 U/ml), streptomycin (100 μg/ml), and 10% FBS. All cells were cultured in a humidified atmosphere of 5% CO₂ maintained at 37° C.

[0650] siRNA Transfection.

[0651] SH-SY5Y cells (ATCC, passage 8) and HEK293 (ATCC, passage 12) were reverse transfected with 100 nM siControl (AM4611) or siFRM1 (ID# s5316) for 3 days using Lipofectamine RNAiMax (Invitrogen) according to manufacturer's protocol. All siRNAs were purchased from Invitrogen. About 3×10⁶ cells/10 cm plate and about 5×10⁵ cells/well of a 6-well plate were harvested for ribosome profiling and Western blot analysis following siRNA transfection, respectively.

[0652] Western Blot Analysis.

[0653] Cells were washed with PBS and lysed in 1× cell lysis buffer (Cell Signaling) for 15 min at 4° C. Lysates were sonicated briefly, clarified by centrifugation for 15 min at 14,000 rpm, and supernatants were then collected. Protein concentration in the soluble fraction was determined by BCA protein assay (Thermo Scientific). A 4-20% Bis-Tris gradient gel (Invitrogen) was used to resolve 20 μg of protein and transferred to nitrocellulose membrane. The resulting membranes were blocked for 1 hr at room temperature with Odyssey blocking solution (LI-COR) and then incubated with primary antibodies at 4° C. overnight. The following day, the blots were washed 3 times, 10 min each in TBST, and incubated with IR-conjugated anti-rabbit IgG and anti-mouse IgG secondary antibody (IRDye 800 CW at 1:20,000; LI-COR) for 1 hour at room temperature. The blots were then washed, scanned, and specific proteins were detected using the LI-COR Odyssey infrared imager. The following antibodies were used at 1:1000 dilution from Cell Signaling: anti-FMRP (#4317), anti-TSC2 (#4308), and anti-β-actin (#4970).

[0654] Ribosomal Profiling.

[0655] Cells were washed with cold PBS supplemented with cycloheximide and lysed with 1× mammalian lysis buffer for 10 min on ice. Lysates were clarified by centrifugation for 10 min at 14,000 rpm and supernatants were collected. Cell lysates were processed to generate the ribosomal protected fragments and total mRNA according to the instructions included with the ARTseq Ribosome Profiling Kit. Sequencing of total RNA (RNA) and of ribosome-protected fragments of RNA (RPF) was carried out with standard Illumina rna seq methodology.

[0656] Bioinformatics Analysis.

[0657] RNA-seq reads were processed with tools from the FASTX-Toolkit (fastq_quality_trimmer, fastx_clipper and fastx_trimmer). Unprocessed and processed reads were evaluated for a variety of quality measures using FastQC. Processed reads were mapped to the human genome using Tophat. Gene-by-gene assessment of the number of fragments strictly and uniquely mapping to the coding region of each gene was conducted using HTSeq-count, a component of the HTSeq package. Differential analyses of the knockdown of the FMR1 gene were carried out with the software packages DESeq for transcription (RNA counts) and translational rate (RPF counts) and BABEL for translational efficiency based upon ribosomal occupancy as a function of RNA level (RNA and RPF counts). Genes with low counts in either RPF or RNA were excluded from differential analyses.

### Expression Levels of FMRP and TSC2 Following Transient Knockdown of FMR1.

[0658] SH-SY5Y cells were transfected with either siControl or siFMR1 at 100 nM for 3 days. Protein levels of FMRP and TSC2 (a known translational target of FMRP) were evaluated by western blot analysis (FIG. 35), and β-actin was used as a loading control. The uppermost band observed in the western blot analysis represents the FMR1 isoform and is sensitive to the siFMR1 knockdown. An approximately 30% knockdown efficiency of FMRP was determined by integrating the band intensities, as well as quantitating by q-PCR analysis (data not shown). The protein expression levels of TSC2 increased after knocking down FMRP, a negative translational regulator.

[0659] Ribosomal profiling was used to measure changes in transcription and translation on a genome-wide basis after transfecting the cells with either siControl or siFMR1. Analysis of the sequencing results for the FMR1 gene shows that about a 30% reduction was observed, consistent with the western blot and q-PCR analyses. The FMRP specific target, TSC2, showed a corresponding ˜30% increase in the translational rate in the absence of a change in transcriptional levels. On a genome-wide evaluation, knockdown of the FMR1 gene resulted in minimal changes in the transcriptome (see, FIG. 36) with only a log 2 fold change of 2.3 and 1.6 for the top two up-regulated genes (log 2 fold change of −1.6 and −1.2 for the top two down-regulated genes). Changes in the translational rate were identified for a number of genes in the absence of a change in transcriptional levels, corresponding to a change in the translational efficiency. These results indicate that FMRP is responsible for the translational regulation of this specific set of genes.

[0660] Known translation targets of FMRP have been reported to include eEF2, eEF1, all three eIF4G isoforms, TSC2 and SYNGAP1. Consistent with these reports, the sequencing data showed that for the knockdown of FMRP, the elongation factors (eEF2 and eEF1) as well as TSC2 and SYNGAP1 had an associated increase in translational rate (increased translation of these targets) by 30-50% in the absence of changes of RNA levels. In contrast, no changes in either RNA levels or translational rates were observed for the three eIF4G isoforms.

[0661] The set of genes identified via changes in translational efficiency or rate upon knockdown of the FMR1 gene is quite distinct from the corresponding set based on transcription. Of particular interest are the top 20 up- or down-regulated genes (log 2 fold increase of 1.9-3.5 (p-value ≦0.001) or decrease of 1.5-2.2 (p-value ≦0.05), respectively) from changes in translational efficiency. Of these 40 genes, only 3 also had significant (p<0.05) movement in mRNA levels. As shown in FIGS. 37, 60 and 45% of these 20 translationally up- and 20 down-regulated genes, respectively, are associated with neurological disease or development. This enrichment for neurological association increased to 70% and 50% for the top 10 up- and down-regulated genes, respectively.

[0662] Conclusions.

[0663] Fragile X is the most inheritable form of mental retardation. Current concepts of how FMRP regulates the translation of specific mRNAs are still being elucidated. This example shows that ribosome profiling and pathway analysis of genome-wide translational efficiencies after FMRP knockdown translationally regulates genes that are highly associated with neurological disease and development providing a novel insight into the key genes that are translationally regulated. The genes identified represent a new set of validated targets for points of intervention for the treatment of fragile X syndrome.

### Example 10

### Translational Profiling of an Inflammation Cell Model

[0664] Macrophages treated with LPS have been shown to stimulate cytokine production as well as activation of both the PI3K and RAS pathways (Weintz et al., Mol. Sys. Biol. 371:1, 2010). In this example, LPS-induced macrophage activation was evaluated by monitoring TNF-α levels along with phosphorylation of components in the PI3K and RAS pathways.

[0665] Cell Culture and TNFα Measurements.

[0666] RAW264.7 murine macrophages (ATCC) were cultured in DMEM containing 10% FBS supplemented with Penicillin, Streptomycin, Glutamax (Invitrogen) at 37° C. in a humidified incubator with 5% CO2. Cells were treated with inhibitor or DMSO for 2 hrs prior to 1 ng/ml LPS challenge (Sigma) for an additional 1 hr. Media was collected, centrifuged, and supernatants were used for TNF-α ELISA according to manufacturer's instructions (R&D Systems #MTA00B). Approximately 5×10⁶ cells/10 cm dish and 0.5×10⁶ cells/well of a 6-well plate were used for ribosome profiling and Western blot analysis, respectively.

[0667] Western Blot Analysis.

[0668] Cells were washed with PBS and lysed in 1× cell lysis buffer (Cell Signaling) for 15 min at 4° C. Lysates were sonicated briefly, clarified by centrifugation for 15 min at 14,000 rpm, and supernatants were then collected. Protein concentration in the soluble fraction was determined by BCA protein assay (Thermo Scientific). A 4-20% Bis-Tris gradient gel (Invitrogen) was used to resolve 20 μg of protein and transferred to nitrocellulose membrane. The resulting membranes were blocked for 1 hr at room temperature with Odyssey blocking solution (LI-COR) and then incubated with primary antibodies at 4° C. overnight. The following day, the blots were washed 3 times, 10 min each in TBST, and incubated with IR-conjugated anti-rabbit IgG and anti-mouse IgG secondary antibody (IRDye 800 CW at 1:20,000; LI-COR) for 1 hour at room temperature. The blots were then washed, scanned, and specific proteins were detected using the LI-COR Odyssey infrared imager. The following antibodies were used at 1:1000 dilution from Cell Signaling: anti-phospho-4EBP(Ser65), anti-phospho-rpS6(Ser235/236) (#4858), anti-phospho-ERK1/2(Thr202/Tyr204) (#4370), anti-phospho-p70S6K(Thr421/Ser424) (#9204), anti-phospho-pAKT(Ser473), anti-phospho-eIF4E(Ser209), anti-phospho-RSK(Thr359/Ser363), anti-β-actin (#4970).

[0669] Ribosomal Profiling.

[0670] Cells were washed with cold PBS supplemented with cycloheximide and lysed with 1× mammalian lysis buffer for 10 min on ice. Lysates were clarified by centrifugation for 10 min at 14,000 rpm and supernatants were collected. Cell lysates were processed to generate the ribosomal protected fragments and total mRNA according to the instructions included with the ARTseq Ribosome Profiling Kit. Sequencing of total RNA (RNA) and of ribosome-protected fragments of RNA (RPF) was carried out with standard Illumina rna seq methodology.

[0671] Bioinformatics Analysis.

[0672] RNA-seq reads were processed with tools from the FASTX-Toolkit (fastq_quality_trimmer, fastx_clipper and fastx_trimmer). Unprocessed and processed reads were evaluated for a variety of quality measures using FastQC. Processed reads were mapped to the human genome using Tophat. Gene-by-gene assessment of the number of fragments strictly and uniquely mapping to the coding region of each gene was conducted using HTSeq-count, a component of the HTSeq package. Differential analyses of the stimulation of LPS and effect of drug treatment were carried out with the software packages DESeq for transcription (RNA counts) and translational rate (RPF counts) and BABEL for translational efficiency based upon ribosomal occupancy as a function of RNA level (RNA and RPF counts). Genes with low counts in either RPF or RNA were excluded from differential analyses. Pathway and network analyses of differential data was conducted using Ingenuity Pathway Analysis (IPA).

[0673] Results.

[0674] These data show that after 1 hour of 1 ng/mL LPS stimulation, TNF-α levels were seen to rapidly increase (FIG. 38), and increased phosphorylation was observed for RSK and ERK within the RAS pathway, as well as for AKT, S6K (modest) and S6 in the PI3K pathway (see, FIG. 40). No changes in the phosphorylation levels of 4EBP, eIF4E or the housekeeping gene, β-actin, were discernable (FIG. 40). Treatment with an inhibitor of a PI3K/Akt/mTOR pathway enzyme (“PAMi”) or a MEK/ERK pathway enzyme (“MEi”), for 2 hours prior to the LPS stimulation, reduced the levels of TNF-α production (FIGS. 38 and 39). In particular, PAMi substantially inhibited phosphorylation of AKT, 4EBP and S6K at the lowest concentration tested and reduced phosphorylation of S6 and eIF4E, but did not alter the phosphorylation of RSK or ERK at the concentrations used (FIG. 41). The MEi induced a dose dependent inhibition of the phosphorylation of ERK and S6 (with no effects on the phosphorylation of 4EBP, eIF4E, and S6K) (FIG. 41), wherein preincubation with 16 nM MEi essentially prevented LPS stimulated production of TNF-α (FIG. 39).

[0675] Ribosomal profiling was used to measure changes in transcription and translation on a genome-wide basis after stimulating macrophages with LPS. LPS is known to activate transcription for a number of genes. The majority of transcriptional changes were correlated with a change in translational rate as shown by the data points along the diagonal (see, FIG. 42). Conversely, a significant number of changes in translational rate were independent of transcriptional changes (data points in red along the y-axis where x is zero). The level of TNF-α mRNA increased with LPS stimulation; however, the amount of ribosome protected fragments were in excess to the mRNA increases. These data demonstrate that TNF-α is regulated at the translational level in addition to having transcriptional changes. In addition, a number of genes were seen to be regulated at a translational level in the absence of a change in transcription levels providing a unique window of understanding the mechanism of inflammatory disease.

[0676] The gene sets for transcription, translational rate and translational efficiency were analyzed for pathway and network connections using IPA software. The output of the pathway analysis demonstrated that the transcriptome was strongly associated with inflammatory disease (p-value=3.3E-09). The pathway analysis did not highlight pathways for the translational efficiency set of genes that were strongly supported statistically. However, the top 20 genes that were identified as translationally regulated were enriched for association with inflammatory diseases. Specifically, the top 10 translationally up- and down-regulated genes were enriched 70% and 50%, respectively, for association with inflammatory disease (p-value ≦0.05). Only 3 of these 20 translationally regulated genes were statistically significant for changes in RNA levels.

[0677] Treatment of macrophages with a PAMi or MEi followed with LPS stimulation showed that drug treatment was able to restore the translational efficiencies back to normal levels for the top 20 regulated genes. Interestingly, PAMi was more effective at renormalizing this gene subset when compared with MEi. Treatment of the cells with these drugs did not correspond with altering the translational efficiency of TNF-α. These results indicate that drug treatment modulates the level of TNF-α by regulating the translational levels of other inflammatory disease related genes.

[0678] This example shows that ribosome profiling and pathway analysis of genome-wide translational efficiencies after LPS stimulation translationally regulates genes that are highly associated with inflammatory disease providing a novel insight into the key genes that are translationally regulated.

### Example 11

### Translational Profiling of Primary Cells

[0679] A subject diagnosed with prostate cancer (a Gleason 3+4 tumor) underwent a radical prostatectomy, and the isolated prostate was frozen. Samples removed from frozen pieces of the prostate were reviewed by a pathologist and areas were deemed cancer versus normal. Translational profiles of normal prostate tissue and cancer prostate tissue were generated using ribosomal profiling as described herein. FIG. 43 shows a representative comparison of the change in translational efficiency in normal versus tumor tissue, with each data point representing a single gene. Data points highlighted in red and green have statistically significant changes in translational efficiency versus the population of genes as a whole. For example, the green dots represent genes that have statistically significant lower ribosome occupancy and, therefore, a reduced translational efficiency as compared to the population of genes examined. The differential translational profile between the healthy and cancer tissues shows that there are many genes with significantly greater translational efficiency and significantly reduced translational efficiency (FIG. 44).

[0680] It is understood that the examples and embodiments described herein are for illustrative purposes only and that various modifications or changes in light thereof will be suggested to persons skilled in the art and are to be included within the spirit and purview of this application and scope of the appended claims. All publications, patents, and patent applications cited herein are hereby incorporated by reference in their entirety for all purposes.

1. A method for identifying a candidate therapeutic for treating a disease, the method comprising:
(a) determining a first translational profile for a plurality of genes for a disease sample that has been contacted with a candidate agent;
(b) determining a second translational profile for a plurality of genes for a disease sample that has not been contacted with the agent; and
(c) identifying the agent as a candidate therapeutic for treating the disease when one or more genes are differentially translated in the first translation profile as compared to the second translation profile and when the differential translation results in a biological benefit.

2. A method for identifying a candidate therapeutic for treating a disease, the method comprising:
(a) determining a first translational profile for a plurality of genes from a disease sample that has been contacted with a candidate agent;
(b) determining a second translational profile for a plurality of genes from a disease sample that has been contacted with a known active compound for treating the disease; and
(c) identifying the agent as a candidate therapeutic for use in treating the disease when the first translational profile is comparable to the second translational profile.

3. The method of claim 2, wherein the known active compound is a therapeutic agent for a cancer, an inflammatory disease, an autoimmune disease, a fibrotic disorder, a neurodegenerative disease, a neurodevelopmental disease, a metabolic disease, or a viral infection.

4. The method of claim 2, wherein the translational profiles comprise one or more gene signatures, and wherein the translational profiles of the one or more gene signatures are comparable in the first translational profile and second translational profile.

5. The method of claim 2, wherein the first and second translational profiles are comparable when an amount of protein translated from one or more differentially translated genes in the first and second translational profiles differs by no more than about 25%, 20%, 15%, 10%, 5%, 1% or less.

6. The method of claim 1, wherein the one or more differentially translated genes comprises a plurality of genes.

7. The method of claim 6, wherein the plurality of differentially translated genes comprise one or more gene signatures or are from one or more biological pathways.

8-15. (canceled)

16. The method of claim 1, wherein the disease is a cancer, an inflammatory disease, an autoimmune disease, a fibrotic disorder, a neurodegenerative disease, a neurodevelopmental disease, a metabolic disease, or a viral infection.

17. (canceled)

18. The method of claim 16, wherein the disease is a cancer selected from prostate cancer, breast cancer, bladder cancer, lung cancer, renal cell carcinoma, endometrial cancer, melanoma, ovarian cancer, thyroid cancer, or brain cancer.

19-21. (canceled)

22. The method of claim 1, wherein each translational profile comprises a genome-wide translational profile.

23. The method of claim 22, wherein less than about 20% of the genes in the genome are differentially translated in the first translational profile as compared to the second translational profile.

24. The method of claim 22, wherein less than about 5% of the genes in the genome are differentially translated by at least two-fold in the first translational profile as compared to the second translational profile.

25. (canceled)

26. The method of claim 1, wherein the identified agent inhibits the activity of a downstream effector of an oncogenic signaling pathway, wherein the effector is eIF4E, 4EBP1, p70S6K1/2, or AKT.

27. A method for identifying a candidate therapeutic for treating a disease, the method comprising:
(a) determining three independent translational profiles, each for a plurality of genes from a disease sample, wherein (i) a first translational profile is from a sample not contacted with any compound; (ii) a second translational profile is from a sample that has been contacted with a known active compound for treating the disease; and (iii) a third translational profile is from a sample that has been contacted with a candidate agent;
(b) identifying one or more genes as differentially translated in the first translational profile as compared to the second translational profile; and
(c) identifying the agent as a candidate therapeutic for use in treating the disease when the one or more differentially translated genes from step (b) are in the third translational profile and when the translational profile of the one or more genes in the third translational profile is closer to the translational profile of the one or more genes in the second translational profile than to the translational profile of the one or more genes in the first translational profile.

28. The method of claim 27, wherein the one or more differentially translated genes from the third translational profile have a translational profile closer to the translational profile of the one or more genes in the second translational profile when the amount of protein translated from the one or more differentially translated genes in the third and second translational profiles differs by no more than about 50%, 45%, 40%, 35%, 30%, 25%, 20%, 15%, 10%, 5%, 1% or less.

29. A method for identifying a candidate therapeutic for treating a disease, the method comprising:
(a) determining three independent translational profiles, each for a plurality of genes from a disease sample, wherein (i) a first translational profile is from a sample not contacted with any compound; (ii) a second translational profile is from a sample that has been contacted with a known active compound for treating the disease; and (iii) a third translational profile is from a sample that has been contacted with a candidate agent;
(b) determining a first differential translational profile comprising one or more genes differentially translated in the first translational profile as compared to the second translational profile, and determining a second differential translational profile comprising one or more genes differentially translated in the first translational profile as compared to the third translational profile; and
(c) identifying the agent as a candidate therapeutic for use in treating the disease when the first differential translational profile is comparable to the second differential translational profile.

30. The method of claim 29, wherein the first and second differential translational profiles are comparable when the amount of protein translated from the one or more differentially translated genes in the first and second differential translational profiles differs by no more than about 50%, 45%, 40%, 35%, 30%, 25%, 20%, 15%, 10%, 5%, 1% or less.

31. The method of claim 27, wherein the known active compound is a therapeutic agent for a cancer, an inflammatory disease, an autoimmune disease, a fibrotic disorder, a neurodegenerative disease, a neurodevelopmental disease, a metabolic disease, or a viral infection.

32. The method of claim 27, wherein the one or more differentially translated genes comprises a plurality of genes.

33. The method of claim 32, wherein the plurality of differentially translated genes comprise one or more gene signatures or are from one or more biological pathways.

34-40. (canceled)

41. The method of claim 27, wherein the disease is a cancer, an inflammatory disease, an autoimmune disease, a fibrotic disorder, a neurodegenerative disease, a neurodevelopmental disease, a metabolic disease, or a viral infection.

42. (canceled)

43. The method of claim 41, wherein the disease is a cancer selected from prostate cancer, breast cancer, bladder cancer, lung cancer, renal cell carcinoma, endometrial cancer, melanoma, ovarian cancer, thyroid cancer, or brain cancer.

44-46. (canceled)

47. The method of claim 27, wherein each translational profile comprises a genome-wide translational profile.

48. The method of claim 47, wherein less than about 20% of the genes in the genome are differentially translated in the first translational profile as compared to the second translational profile.

49. The method of claim 47, wherein less than about 5% or less than about 1% of the genes in the genome are differentially translated by at least two-fold in the first translational profile as compared to the second translational profile.

50. The method of claim 1, further comprising chemically synthesizing a structurally related agent derived from the identified candidate therapeutic.

51-53. (canceled)

54. A method for identifying a candidate therapeutic for normalizing a translational profile associated with a disease, the method comprising:
(a) determining a first translational profile for a plurality of genes from a disease sample that has been contacted with a candidate agent;
(b) determining a second translational profile for a plurality of genes from (1) a control non-diseased sample or (2) a control non-diseased sample that has been contacted with the candidate agent; and
(c) identifying the agent as a candidate therapeutic for normalizing a translational profile associated with the disease when the first translational profile is comparable to the second translational profile.

55. A method for identifying a candidate therapeutic for normalizing a translational profile associated with a disease, the method comprising:
(a) determining three independent translational profiles, each for a plurality of genes, wherein (i) a first translational profile is from a disease sample, (ii) a second translational profile is from (1) a control non-diseased sample or (2) a control non-diseased sample that has been contacted with a candidate agent, and (iii) a third translational profile is from a disease sample that has been contacted with the candidate agent;
(b) identifying one or more genes as differentially translated in the first translational profile as compared to the second profile; and
(c) identifying the agent as a candidate therapeutic for normalizing a translational profile associated with the disease when the one or more differentially translated genes from step (b) are in the third translational profile and when the translational profile of the one or more genes in the third translational profile is closer to the translational profile of the one or more genes in the second translational profile than to the translational profile of the one or more genes in the first translational profile.

56. The method of claim 55, wherein the one or more differentially translated genes from the third translational profile have a translational profile closer to the translational profile of the one or more genes in the second translational profile when the amount of protein translated from the one or more differentially translated genes in the third and second translational profiles differs by no more than about 50%, 45%, 40%, 35%, 30%, 25%, 20%, 15%, 10%, 5%, 1% or less.

57. A method for identifying a candidate therapeutic for normalizing a translational profile associated with a disease, the method comprising:
(a) determining three independent translational profiles, each for a plurality of genes, wherein (i) a first translational profile is from a disease sample, (ii) a second translational profile is from (1) a control non-diseased sample or (2) a control non-diseased sample that has been contacted with a candidate agent, and (iii) a third translational profile is from a disease sample that has been contacted with the candidate agent;
(b) determining a first differential translational profile comprising one or more genes differentially translated in the first translational profile as compared to the second translational profile, and determining a second differential translational profile comprising one or more genes differentially translated in the first translational profile as compared to the third translational profile; and
(c) identifying the agent as a candidate therapeutic for normalizing a translational profile associated with the disease when the first differential translational profile is comparable to the second differential translational profile.

58. The method of claim 57, wherein the first and second differential translational profiles are comparable when the amount of protein translated from the one or more differentially translated genes in the first and second differential translational profiles differs by no more than about 50%, 45%, 40%, 35%, 30%, 25%, 20%, 15%, 10%, 5%, 1% or less.

59. The method of claim 54, wherein the disease is a cancer, an inflammatory disease, an autoimmune disease, a fibrotic disorder, a neurodegenerative disease, a neurodevelopmental disease, a metabolic disease, or a viral infection.

60-61. (canceled)

62. The method of claim 54, wherein the one or more differentially translated genes comprises a plurality of genes.

63. The method of claim 62, wherein the plurality of differentially translated genes comprise one or more gene signatures or are from one or more biological pathways.

64-65. (canceled)

66. The method of claim 54, wherein each translational profile comprises a genome-wide translational profile.

67. The method of claim 66, wherein less than about 20% of the genes in the genome are differentially translated in the first translational profile as compared to the second translational profile.

68. The method of claim 66, wherein less than about 5% or less than about 1% of the genes in the genome are differentially translated by at least two-fold in the first translational profile as compared to the second translational profile.

69. A method of validating a target for therapeutic intervention in a disease, the method comprising:
(a) determining a first translational profile for a plurality of genes from a disease sample that has been contacted with an agent that modulates a target;
(b) determining a second translational profile for a plurality of genes from a control disease sample that has not been contacted with the agent; and
(c) validating the target for therapeutic intervention in the disease when one or more genes are differentially translated in the first translational profile as compared to the second translational profile and when the differential translation results in a biological benefit.

70. A method of validating a target for therapeutic intervention in a disease, the method comprising:
(a) determining a first translational profile for a plurality of genes from a disease sample that has been contacted with an agent that modulates a target;
(b) determining a second translational profile for a plurality of genes from a control disease sample that has been contacted with a known active compound for treating the disease; and
(c) validating the target as a target for therapeutic intervention in the disease when the first translational profile is comparable to the second translational profile.

71. The method of claim 70, wherein the known active compound is a therapeutic agent for a cancer, an inflammatory disease, an autoimmune disease, a fibrotic disorder, a neurodegenerative disease, a neurodevelopmental disease, a metabolic disease, or a viral infection.

72. The method of claim 70, wherein the translational profiles comprise one or more gene signatures, and wherein the translational profiles of the one or more gene signatures are comparable in the first translational profile and second translational profile.

73. The method of claim 70, wherein the first and second translational profiles are comparable when an amount of protein translated from one or more differentially translated genes in the first and second translational profiles differs by no more than about 50%, 45%, 40%, 35%, 30%, 25%, 20%, 15%, 10%, 5%, 1% or less.

74. The method of claim 69, wherein the one or more differentially translated genes comprises a plurality of genes.

75. The method of claim 74, wherein the plurality of differentially translated genes comprise one or more gene signatures or are from one or more biological pathways.

76-82. (canceled)

83. The method of claim 69, wherein the disease is a cancer, an inflammatory disease, an autoimmune disease, a fibrotic disorder, a neurodegenerative disease, a neurodevelopmental disease, a metabolic disease, or a viral infection.

84. (canceled)

85. The method of claim 83, wherein the disease is a cancer selected from prostate cancer, breast cancer, bladder cancer, lung cancer, renal cell carcinoma, endometrial cancer, melanoma, ovarian cancer, thyroid cancer, or brain cancer.

86-87. (canceled)

88. The method of claim 69, wherein each translational profile comprises a genome-wide translational profile.

89. The method of claim 88, wherein less than about 20% of the genes in the genome are differentially translated in the first translational profile as compared to the second translational profile.

90. The method of claim 88, wherein less than about 5% or less than about 1% of the genes in the genome are differentially translated by at least two-fold in the first translational profile as compared to the second translational profile.

91. A method for validating a target for therapeutic intervention in a disease, the method comprising:
(a) determining three independent translational profiles, each for a plurality of genes from a disease sample, wherein (i) a first translational profile is from a sample not contacted with any compound, (ii) a second translational profile is from a sample contacted with an agent that modulates a target, and (iii) a third translational profile is from a sample contacted with a known active compound for treating the disease;
(b) identifying one or more genes as differentially translated in the first translational profile as compared to the second translational profile; and
(c) validating the target as a target for therapeutic intervention in the disease when the one or more differentially translated genes from step (b) are in the third translational profile and when the translational profile of the one or more genes in the third translational profile is closer to the translational profile of the one or more genes in the second translational profile than to the translational profile of the one or more genes in the first translational profile.

92. The method of claim 91, wherein the one or more differentially translated genes from the third translational profile have a translational profile closer to the translational profile of the one or more genes in the second translational profile when the amount of protein translated from the one or more differentially translated genes in the third and second translational profiles differs by no more than about 50%, 45%, 40%, 35%, 30%, 25%, 20%, 15%, 10%, 5%, 1% or less.

93. A method for validating a target for therapeutic intervention in a disease, the method comprising:
(a) determining three independent translational profiles, each for a plurality of genes from a disease sample, wherein (i) a first translational profile is from a sample not contacted with any compound, (ii) a second translational profile is from a sample contacted with an agent that modulates a target, and (iii) a third translational profile is from a sample contacted with a known active compound for treating the disease;
(b) determining a first differential translational profile comprising one or more genes differentially translated in the first translational profile as compared to the second translational profile, and determining a second differential translational profile comprising one or more genes differentially translated in the first translational profile as compared to the third translational profile; and
(c) validating the target as a target for therapeutic intervention in the disease when the first differential translational profile is comparable to the second differential translational profile.

94. The method of claim 93, wherein the first and second differential translational profiles are comparable when the amount of protein translated from the one or more differentially translated genes in the first and second differential translational profiles differs by no more than about 50%, 45%, 40%, 35%, 30%, 25%, 20%, 15%, 10%, 5%, 1% or less.

95. The method of claim 91, wherein the known active compound is a therapeutic agent for a cancer, an inflammatory disease, an autoimmune disease, a fibrotic disorder, a neurodegenerative disease, a neurodevelopmental disease, a metabolic disease, or a viral infection.

96. The method of claim 91, wherein the one or more differentially translated genes comprises a plurality of genes.

97. The method of claim 96, wherein the plurality of differentially translated genes comprise one or more gene signatures or are from one or more biological pathways.

98-102. (canceled)

103. The method of claim 91, wherein the disease is a cancer, an inflammatory disease, an autoimmune disease, a fibrotic disorder, a neurodegenerative disease, a neurodevelopmental disease, a metabolic disease, or a viral infection.

104. (canceled)

105. The method of claim 103, wherein the disease is a cancer selected from prostate cancer, breast cancer, bladder cancer, lung cancer, renal cell carcinoma, endometrial cancer, melanoma, ovarian cancer, thyroid cancer, or brain cancer.

106. The method of claim 91, wherein each translational profile comprises a genome-wide translational profile.

107. The method of claim 106, wherein less than about 20% of the genes in the genome are differentially translated in the first translational profile as compared to the second translational profile.

108. The method of claim 106, wherein less than about 5% or less than about 1% of the genes in the genome are differentially translated by at least two-fold in the first translational profile as compared to the second translational profile.

109. A method for validating a target for normalizing a translational profile associated with a disease, the method comprising:
(a) determining a first translational profile for a plurality of genes from a disease sample that has been contacted with an agent that modulates a target;
(b) determining a second translational profile for a plurality of genes from (i) a control non-diseased sample or (ii) a control non-diseased sample that has been contacted with the agent that modulates the target; and
(c) validating the target as a target for normalizing a translational profile associated with the disease when the first translational profile is comparable to the second translational profile.

110. The method of claim 109, wherein the translational profiles comprise one or more gene signatures, and wherein the translational profiles of the one or more gene signatures are comparable in the first and second translational profiles.

111. The method of claim 109, wherein the first and second translational profiles are comparable when an amount of protein translated from one or more differentially translated genes in the first and second translational profiles differs by no more than about 50%, 45%, 40%, 35%, 30%, 25%, 20%, 15%, 10%, 5%, 1% or less.

112. A method for validating a target for normalizing a translational profile associated with a disease, the method comprising:
(a) determining three independent translational profiles, each for a plurality of genes, wherein (i) a first translational profile is from a disease sample, (ii) a second translational profile is from (1) a control non-diseased sample or (2) a control non-diseased sample that has been contacted with an agent that modulates a target, and (iii) a third translational profile is from a disease sample that has been contacted with the agent that modulates the target;
(b) identifying one or more genes as differentially translated in the first translational profile as compared to the second translational profile; and
(c) validating the target as a target for normalizing a translational profile associated with the disease when the one or more differentially translated genes from step (b) are in the third translational profile and when the translational profile of the one or more genes in the third translational profile is closer to the translational profile of the one or more genes in the second translational profile than to the translational profile of the one or more genes in the first translational profile.

113. The method of claim 112, wherein the one or more differentially translated genes from the third translational profile have a translational profile closer to the translational profile of the one or more genes in the second translational profile when the amount of protein translated from the one or more differentially translated genes in the third and second translational profiles differs by no more than about 50%, 45%, 40%, 35%, 30%, 25%, 20%, 15%, 10%, 5%, 1% or less.

114. A method for validating a target for normalizing a translational profile associated with a disease, the method comprising:
(a) determining three independent translational profiles, each for a plurality of genes, wherein (i) a first translational profile is from a disease sample, (ii) a second translational profile is from (1) a control non-diseased sample or (2) a control non-diseased sample that has been contacted with an agent that modulates a target, and (iii) a third translational profile is from a disease sample that has been contacted with the agent that modulates the target;
(b) determining a first differential translational profile comprising one or more genes differentially translated in the first translational profile as compared to the second translational profile, and determining a second differential translational profile comprising one or more genes differentially translated in the first translational profile as compared to the third translational profile; and
(c) validating the target as a target for normalizing a translational profile associated with the disease when the first differential translational profile is comparable to the second differential translational profile.

115. The method of claim 114, wherein the first and second differential translational profiles are comparable when the amount of protein translated from the one or more differentially translated genes in the first and second differential translational profiles differs by no more than about 50%, 45%, 40%, 35%, 30%, 25%, 20%, 15%, 10%, 5%, 1% or less.

116. The method of claim 109, wherein the disease is a cancer, an inflammatory disease, an autoimmune disease, a fibrotic disorder, a neurodegenerative disease, a neurodevelopmental disease, a metabolic disease, or a viral infection.

117. (canceled)

118. The method of claim 116, wherein the disease is a cancer selected from prostate cancer, breast cancer, bladder cancer, lung cancer, renal cell carcinoma, endometrial cancer, melanoma, ovarian cancer, thyroid cancer, or brain cancer.

119-120. (canceled)

121. The method of claim 109, wherein each translational profile comprises a genome-wide translational profile.

122. The method of claim 121, wherein less than about 20% of the genes in the genome are differentially translated in the first translational profile as compared to the second translational profile.

123. The method of claim 121, wherein less than about 5% or less than about 1% of the genes in the genome are differentially translated by at least two-fold in the first translational profile as compared to the second translational profile.

124-127. (canceled)

128. A method of identifying a subject as a candidate for treating a disease with a therapeutic agent, the method comprising:
(a) determining a first translational profile for a plurality of genes in a sample from a subject having or suspected of having a disease selected from a cancer, an inflammatory disease, an autoimmune disease, a neurodegenerative disease, a neurodevelopmental disease, a metabolic disease, and a viral infection;
(b) determining a second translational profile for a plurality of genes in a control sample, wherein the control sample is from a subject known to respond to the therapeutic agent and wherein the sample has not been contacted with the therapeutic agent; and
(c) identifying the subject as a candidate for treating the disease with the therapeutic agent when the first translational profile is comparable to the second translational profile.

129. The method of claim 128, wherein the disease is a cancer selected from prostate cancer, breast cancer, bladder cancer, lung cancer, renal cell carcinoma, endometrial cancer, melanoma, ovarian cancer, thyroid cancer, and brain cancer.

130. (canceled)

131. The method of claim 128, wherein the disease is an inflammatory disease selected from ankylosing spondylitis, atherosclerosis, multiple sclerosis, systemic lupus erythematosus (SLE), psoriasis, psoriatic arthritis, rheumatoid arthritis, ulcerative colitis, inflammatory bowel disease, and Crohn's disease.

132. The method of claim 128, wherein the disease is a fibrotic disorder selected from pulmonary fibrosis, idiopathic pulmonary fibrosis, cystic fibrosis, liver fibrosis, cardiac fibrosis, endomyocardial fibrosis, atrial fibrosis, mediastinal fibrosis, myelofibrosis, retroperitoneal fibrosis, chronic kidney disease, nephrogenic systemic fibrosis, Crohn's disease, hypertrophic scarring, keloid, scleroderma, organ transplant associated fibrosis, and ischemia associated fibrosis.

133. The method of claim 128, wherein the disease is a neurodegenerative disease selected from Parkinson's disease, Alzheimer's disease, Amyotrophic Lateral Sclerosis, Creutzfeldt-Jakob disease, Huntington's disease, Lewy body dementia, frontotemporal dementia, corticobasal degeneration, primary progressive aphasia, and progressive supranuclear palsy.

134. The method of claim 128, wherein the disease is a neurodevelopmental disease selected from autism, autism spectrum disorders, Fragile X Syndrome, attention deficit disorder, and pervasive development disorder.

135. The method of claim 128, wherein the disease is a viral infection selected from adenovirus, bunyavirus, herpesvirus, papovavirus, paramyxovirus, picornavirus, rhabdovirus, orthomyxovirus, poxvirus, reovirus, retrovirus, lentivirus, and flavivirus.

136. The method of claim 128, wherein the translational profiles comprise one or more gene signatures, and wherein the translational profiles of the one or more gene signatures are comparable in the first and second translational profiles.

137-138. (canceled)

139. The method of claim 128, wherein the first and second translational profiles are comparable when an amount of protein translated from one or more differentially translated genes in the first and second translational profiles differs by no more than about 50%, 45%, 40%, 35%, 30%, 25%, 20%, 15%, 10%, 5%, 1% or less.

140. The method of claim 128, wherein each translational profile comprises a genome-wide translational profile.

141. The method of claim 140, wherein less than about 20% of the genes in the genome are differentially translated in the first translational profile as compared to the second translational profile.

142. The method of claim 140, wherein less than about 5% or less than about 1% of the genes in the genome are differentially translated by at least two-fold in the first translational profile as compared to the second translational profile.

143. (canceled)

144. A method for treating a disease selected from a cancer, an inflammatory disease, an autoimmune disease, a neurodegenerative disease, a neurodevelopmental disease, a metabolic disease, and a viral infection, comprising administering a therapeutic agent to a subject identified according to the method of claim 128, thereby treating the subject.

145. A method for treating a disease selected from a cancer, an inflammatory disease, an autoimmune disease, a neurodegenerative disease, a neurodevelopmental disease, a metabolic disease, and a viral infection, the method comprising administering to a subject having the disease a therapeutic agent identified according to the method of claim 1, thereby treating the subject.

146. A method for treating a disease selected from a cancer, an inflammatory disease, an autoimmune disease, a neurodegenerative disease, a neurodevelopmental disease, a metabolic disease, and a viral infection, the method comprising administering to a subject having the disease an agent that modulates a target, wherein the target was validated according to the method of claim 69, thereby treating the subject.

147. A method for treating a disease selected from a cancer, an inflammatory disease, an autoimmune disease, a neurodegenerative disease, a neurodevelopmental disease, a metabolic disease, and a viral infection by normalizing the disease translational profile, the method comprising administering to a subject having the disease a therapeutic agent identified according to the method of claim 54, thereby treating the subject.

148. The method of claim 147, wherein the cancer is prostate cancer, breast cancer, bladder cancer, lung cancer, renal cell carcinoma, endometrial cancer, melanoma, ovarian cancer, thyroid cancer, or brain cancer.

149. The method of claim 147, wherein the inflammatory disease is ankylosing spondylitis, atherosclerosis, multiple sclerosis, systemic lupus erythematosus (SLE), psoriasis, psoriatic arthritis, rheumatoid arthritis, ulcerative colitis, inflammatory bowel disease, or Crohn's disease.

150. The method of claim 147, wherein the fibrotic disease is pulmonary fibrosis, idiopathic pulmonary fibrosis, cystic fibrosis, liver fibrosis, cardiac fibrosis, endomyocardial fibrosis, atrial fibrosis, mediastinal fibrosis, myelofibrosis, retroperitoneal fibrosis, chronic kidney disease, nephrogenic systemic fibrosis, Crohn's disease, hypertrophic scarring, keloid, scleroderma, organ transplant associated fibrosis, or ischemia associated fibrosis.

151. The method of claim 147, wherein the neurodegenerative disease is Parkinson's disease, Alzheimer's disease, Amyotrophic Lateral Sclerosis, Creutzfeldt-Jakob disease, Huntington's disease, Lewy body dementia, frontotemporal dementia, corticobasal degeneration, primary progressive aphasia, or progressive supranuclear palsy.

152. The method of claim 147, wherein the neurodevelopmental disease is autism, autism spectrum disorders, Fragile X Syndrome, attention deficit disorder, or a pervasive development disorder.

153. The method of claim 147, wherein the viral infection is adenovirus, bunyavirus, herpesvirus, papovavirus, paramyxovirus, picornavirus, rhabdovirus, orthomyxovirus, poxvirus, reovirus, retrovirus, lentivirus, or flavivirus.

The application's sequence listing, which the Patent Office published only in electronic form, follows.

SEQUENCE LISTING (287 sequences)

SEQ ID NO: 1 - DNA, 3163 bp, Homo sapiens
  eukaryotic translation elongation factor 2 (EEF2, EF-2, EF2), polypeptidyl-tRNA translocase, SCA26
  CDS (84)...(2660): EEF2
ctcttccgccgtcgtcgccgccatcctcggcgcgactcgcttctttcggttctacctgggagaatccaccgccatccgccaccatggtgaacttcacggtagaccagatccgcgccatcatggacaagaaggccaacatccgcaacatgtctgtcatcgcccacgtggaccatggcaagtccacgctgacagactccctggtgtgcaaggcgggcatcatcgcctcggcccgggccggggagacacgcttcactgatacccggaaggacgagcaggagcgttgcatcaccatcaagtcaactgccatctccctcttctacgagctctcggagaatgacttgaacttcatcaagcagagcaaggacggtgccggcttcctcatcaacctcattgactcccccgggcatgtcgacttctcctcggaggtgactgctgccctccgagtcaccgatggcgcattggtggtggtggactgcgtgtcaggcgtgtgcgtgcagacggagacagtgctgcggcaggccattgccgagcgcatcaagcctgtgctgatgatgaacaagatggaccgcgccctgctggagctgcagctggagcccgaggagctctaccagactttccagcgcatcgtggagaacgtgaacgtcatcatctccacctacggcgagggcgagagcggccccatgggcaacatcatgatcgatcctgtcctcggtaccgtgggctttgggtctggcctccacgggtgggccttcaccctgaagcagtttgccgagatgtatgtggccaagttcgccgccaagggggagggccagttggggcctgccgagcgggccaagaaagtagaggacatgatgaagaagctgtggggtgacaggtactttgacccagccaacggcaagttcagcaagtcagccaccagccccgaagggaagaagctgccacgcaccttctgccagctgatcctggaccccatcttcaaggtgtttgatgcgatcatgaatttcaagaaagaggagacagcaaaactgatagagaaactggacatcaaactggacagcgaggacaaggacaaagaaggcaaacccctgctgaaggctgtgatgcgccgctggctgcctgccggagacgccttgttgcagatgatcaccatccacctgccctcccctgtgacggcccagaagtaccgctgcgagctcctgtacgaggggcccccggacgacgaggctgccatgggcattaaaagctgtgaccccaaaggccctcttatgatgtatatttccaaaatggtgccaacctccgacaaaggtcggttctacgcctttggacgagtcttctcggggctggtctccactggcctgaaggtcaggatcatggggcccaactatacccctgggaagaaggaggacctctacctgaagccaatccagagaacaatcttgatgatgggccgctacgtggagcccatcgaggatgtgccttgtgggaacattgtgggcctcgtgggcgtggaccagttcctggtgaagacgggcaccatcaccaccttcgagcacgcgcacaacatgcgggtgatgaagttcagcgtcagccctgttgtcagagtggccgtggaggccaagaacccggctgacctgcccaagctggtggaggggctgaagcggctggccaagtccgaccccatggtgcagtgcatcatcgaggagtcgggagagcatatcatcgcgggcgccggcgagctgcacctggagatctgcctgaaggacctggaggaggaccacgcctgcatccccatcaagaaatctgacccggtcgtctcgtaccgcgagacggtcagtgaagagtcgaacgtgctctgcctctccaagtcccccaacaagcacaaccggctgtacatgaaggcgcggcccttccccgacggcctggccgaggacatcgataaaggcgaggtgtccgcccgtcaggagctcaagcagcgggcgcgctacctggccgagaagtacgagtgggacgtggctgaggcccgcaagatctggtgctttgggcccgacggcaccggccccaacatcctcaccgacatcaccaagggtgtgcagtacctcaacgagatcaaggacagtgtggtggccggcttccagtgggccaccaaggagggcgcactgtgtgaggagaacatgcggggtgtgcgcttcgacgtccacgacgtcaccctgcacgccgacgccatccaccgcggagggggccagatcatccccacagcacggcgctgcctctatgccagtgtgctgaccgcccagccacgcctcatggagcccatctaccttgtggagatccagtgtccagagcaggtggtcggtggcatctacggggttttgaacaggaagcggggccacgtgttcgaggagtcccaggtggccggcacccccatgtttgtggtcaaggcctatctgcccgtcaacgagtcctttggcttcaccgctgacctgaggtccaacacgggcggccaggcgttcccccagtgtgtgtttgaccactggcagatcctgcccggagaccccttcgacaacagcagccgccccagccaggtggtggcggagacccgcaagcgcaagggcctgaaagaaggcatccctgccctggacaacttcctggacaaattgtaggcggcccttcctgcagcgcctgccgccccggggactcgcagcacccacagcaccacgtcctcgaattctcagacgacacctggagactgtcccgacacagcgacgctcccctgagaggtttctggggcccgctgcgtgccatcactcaaccataacacttgatgccgtttctttcaatatttatttccagagtccggaggcagcagacacgccctcttagtagggacttaatgggccggtcggggagggggaggcgggatgggacacccaacactttttccatttcttcagagggaaactcagatgtccaaactaattttaacaaacgcattaagaggtttatttgggtacatggcccgcagtggcttttgccccagaaaggggaaaggaacacgcgggtagatgatttctagcaggcaggaagtcctgtgcggtgtcaccatgagcacctccagctgtactagtgccattggaataataaatttgataaggtggtgaaaaaa

SEQ ID NO: 2 - DNA, 532 bp, Homo sapiens
  40S ribosomal protein S12, S12
  CDS (83)...(481): RPS12
ctctttccctgccgccgccgagtcgcgcggaggcggaggcttgggtgcgttcaagattcaacttcacccgtaacccaccgccatggccgaggaaggcattgctgctggaggtgtaatggacgttaatactgctttacaagaggttctgaagactgccctcatccacgatggcctagcacgtggaattcgcgaagctgccaaagccttagacaagcgccaagcccatctttgtgtgcttgcatccaactgtgatgagcctatgtatgtcaagttggtggaggccctttgtgctgaacaccaaatcaacctaattaaggttgatgacaacaagaaactaggagaatgggtaggcctttgtaaaattgacagagaggggaaaccccgtaaagtggttggttgcagttgtgtagtagttaaggactatggcaaggagtctcaggccaaggatgtcattgaagagtatttcaaatgcaagaaatgaagaaataaatctttggctcacaaaaaaaaaaaaaaaaaaaaaaaaaaaaaa

SEQ ID NO: 3 - DNA, 674 bp, Homo sapiens
  60S ribosomal protein L12
  CDS (116)...(613): RPL12
atctggcttgtccgcgcgatttccggcctctcggctttcggctcggaggaggccaaggtgcaacttccttcggtcgtcccgaatccgggttcatccgacaccagccgcctccaccatgccgccgaagttcgaccccaacgagatcaaagtcgtatacctgaggtgcaccggaggtgaagtcggtgccacttctgccctggcccccaagatcggccccctgggtctgtctccaaaaaaagttggtgatgacattgccaaggcaacgggtgactggaagggcctgaggattacagtgaaactgaccattcagaacagacaggcccagattgaggtggtgccttctgcctctgccctgatcatcaaagccctcaaggaaccaccaagagacagaaagaaacagaaaaacattaaacacagtgggaatatcacttttgatgagattgtcaacattgctcgacagatgcggcaccgatccttagccagagaactctctggaaccattaaagagatcctggggactgcccagtcagtgggctgtaatgttgatggccgccatcctcatgacatcatcgatgacatcaacagtggtgctgtggaatgcccagccagttaagcacaaaggaaaacatttcaataaaggatcatttgacaactggtggaaaaaaaaaaaaaaa

SEQ ID NO: 4 - DNA, 962 bp, Homo sapiens
  40S ribosomal protein S2, S2, LLREP3, protein LLRep3, OK/KNS-cl.6
  CDS (24)...(905): RPS2
cttcttttccgacaaaacaccaaatggcggatgacgccggtgcagcgggggggcccgggggccctggtggccctgggatggggaaccgcggtggcttccgcggaggtttcggcagtggcatccggggccggggtcgcggccgtggacggggccggggccgaggccgcggagctcgcggaggcaaggccgaggataaggagtggatgcccgtcaccaagttgggccgcttggtcaaggacatgaagatcaagtccctggaggagatctatctcttctccctgcctattaaggaatcagagatcattgatttcttcctgggggcctctctcaaggatgaggttttgaagattatgccagtgcagaagcagacccgtgccggccagcgcaccaggttcaaggcatttgttgctatcggggactacaatggccacgtcggtctgggtgttaagtgctccaaggaggtggccaccgccatccgtggggccatcatcctggccaagctctccatcgtccccgtgcgcagaggctactgggggaacaagatcggcaagccccacactgtcccttgcaaggtgacaggccgctgcggctctgtgctggtacgcctcatccctgcacccaggggcactggcatcgtctccgcacctgtgcctaagaagctgctcatgatggctggtatcgatgactgctacacctcagcccggggctgcactgccaccctgggcaacttcgccaaggccacctttgatgccatttctaagacctacagctacctgacccccgacctctggaaggagactgtattcaccaagtctccctatcaggagttcactgaccacctcgtcaagacccacaccagagtctccgtgcagcggactcaggctccagctgtggctacaacatagggtttttatacaagaaaaataaagtgaattaagcgtgaaaaaaaaaaaaaaaaaaaa

SEQ ID NO: 5 - DNA, 1196 bp, Homo sapiens
  60S ribosomal protein L13a, L13A, transcript variant 1, tissue specific transplantation antigen 1 (TSTA1), 23 kDa highly basic protein
  CDS (77)...(688): RPL13A
cacttctgccgcccctgtttcaagggataagaaaccctgcgacaaaacctcctccttttccaagcggctgccgaagatggcggaggtgcaggtcctggtgcttgatggtcgaggccatctcctgggccgcctggcggccatcgtggctaaacaggtactgctgggccggaaggtggtggtcgtacgctgtgaaggcatcaacatttctggcaatttctacagaaacaagttgaagtacctggctttcctccgcaagcggatgaacaccaacccttcccgaggcccctaccacttccgggcccccagccgcatcttctggcggaccgtgcgaggtatgctgccccacaaaaccaagcgaggccaggccgctctggaccgtctcaaggtgtttgacggcatcccaccgccctacgacaagaaaaagcggatggtggttcctgctgccctcaaggtcgtgcgtctgaagcctacaagaaagtttgcctatctggggcgcctggctcacgaggttggctggaagtaccaggcagtgacagccaccctggaggagaagaggaaagagaaagccaagatccactaccggaagaagaaacagctcatgaggctacggaaacaggccgagaagaacgtggagaagaaaattgacaaatacacagaggtcctcaagacccacggactcctggtctgagcccaataaagactgttaattcctcatgcgttgcctgcccttcctccattgttgccctggaatgtacgggacccaggggcagcagcagtccaggtgccacaggcagccctgggacataggaagctgggagcaaggaaagggtcttagtcactgcctcccgaagttgcttgaaagcactcggagaattgtgcaggtgtcatttatctatgaccaataggaagagcaaccagttactatgagtgaaagggagccagaagactgattggagggccctatcttgtgagtggggcatctgttggactttccacctggtcatatactctgcagctgttagaatgtgcaagcacttggggacagcatgagcttgctgttgtacacagggtatttctagaagcagaaatagactgggaagatgcacaaccaaggggttacaggcatcgcccatgctcctcacctgtattttgtaatcagaaataaattgcttttaaagaaaaaaaaaaaaaaaaaa

SEQ ID NO: 6 - DNA, 671 bp, Homo sapiens
  60S ribosomal protein L18a, L18A, ribosomal protein L18a-like protein
  CDS (80)...(610): RPL18A
ggtagtgaaggcctggtgaacggctgcgcgacagaggacacttccttttgcgggtggcggcgaacgcggagagcacgccatgaaggcctcgggcacgctacgagagtacaaggtagtgggtcgctgcctgcccacccccaaatgccacacgccgcccctctaccgcatgcgaatctttgcgcctaatcatgtcgtcgccaagtcccgcttctggtactttgtatctcagttaaagaagatgaagaagtcttcaggggagattgtctactgtgggcaggtgtttgagaagtcccccctgcgggtgaagaacttcgggatctggctgcgctatgactcccggagcggcacccacaacatgtaccgggaataccgggacctgaccaccgcaggcgctgtcacccagtgctaccgagacatgggtgcccggcaccgcgcccgagcccactccattcagatcatgaaggtggaggagatcgcggccagcaagtgccgccggccggctgtcaagcagttccacgactccaagatcaagttcccgctgccccaccgggtcctgcgccgtcagcacaagccacgcttcaccaccaagaggcccaacaccttcttctaggtgcagggccctcgtccgggtgtgccccaaataaactcaggaacgccccggtgctcgccgc

SEQ ID NO: 7 - DNA, 3528 bp, Homo sapiens
  eukaryotic translation elongation factor 1 alpha 1 (EEF1A1, EE1A1, EEF-1, EEF1A), cervical cancer suppressor 3 (CCS3), leukocyte receptor cluster member 7, prostate tumor-inducing protein 1 (PTI1), glucocorticoid receptor AF-1 specific elongation factor (GRAF-1EF)
  CDS (64)...(1452): EEF1A1
ctttttcgcaacgggtttgccgccagaacacaggtgtcgtgaaaactacccctaaaagccaaaatgggaaaggaaaagactcatatcaacattgtcgtcattggacacgtagattcgggcaagtccaccactactggccatctgatctataaatgcggtggcatcgacaaaagaaccattgaaaaatttgagaaggaggctgctgagatgggaaagggctccttcaagtatgcctgggtcttggataaactgaaagctgagcgtgaacgtggtatcaccattgatatctccttgtggaaatttgagaccagcaagtactatgtgactatcattgatgccccaggacacagagactttatcaaaaacatgattacagggacatctcaggctgactgtgctgtcctgattgttgctgctggtgttggtgaatttgaagctggtatctccaagaatgggcagacccgagagcatgcccttctggcttacacactgggtgtgaaacaactaattgtcggtgttaacaaaatggattccactgagccaccctacagccagaagagatatgaggaaattgttaaggaagtcagcacttacattaagaaaattggctacaaccccgacacagtagcatttgtgccaatttctggttggaatggtgacaacatgctggagccaagtgctaacatgccttggttcaagggatggaaagtcacccgtaaggatggcaatgccagtggaaccacgctgcttgaggctctggactgcatcctaccaccaactcgtccaactgacaagcccttgcgcctgcctctccaggatgtctacaaaattggtggtattggtactgttcctgttggccgagtggagactggtgttctcaaacccggtatggtggtcacctttgctccagtcaacgttacaacggaagtaaaatctgtcgaaatgcaccatgaagctttgagtgaagctcttcctggggacaatgtgggcttcaatgtcaagaatgtgtctgtcaaggatgttcgtcgtggcaacgttgctggtgacagcaaaaatgacccaccaatggaagcagctggcttcactgctcaggtgattatcctgaaccatccaggccaaataagcgccggctatgcccctgtattggattgccacacggctcacattgcatgcaagtttgctgagctgaaggaaaagattgatcgccgttctggtaaaaagctggaagatggccctaaattcttgaagtctggtgatgctgccattgttgatatggttcctggcaagcccatgtgtgttgagagcttctcagactatccacctttgggtcgctttgctgttcgtgatatgagacagacagttgcggtgggtgtcatcaaagcagtggacaagaaggctgctggagctggcaaggtcaccaagtctgcccagaaagctcagaaggctaaatgaatattatccctaatacctgccaccccactcttaatcagtggtggaagaacggtctcagaactgtttgtttcaattggccatttaagtttagtagtaaaagactggttaatgataacaatgcatcgtaaaaccttcagaaggaaaggagaatgttttgtggaccactttggttttcttttttgcgtgtggcagttttaagttattagtttttaaaatcagtactttttaatggaaacaacttgaccaaaaatttgtcacagaattttgagacccattaaaaaagttaaatgagaaacctgtgtgttcctttggtcaacaccgagacatttaggtgaaagacatctaattctggttttacgaatctggaaacttcttgaaaatgtaattcttgagttaacacttctgggtggagaatagggttgttttccccccacataattggaaggggaaggaatatcatttaaagctatgggagggttgctttgattacaacactggagagaaatgcagcatgttgctgattgcctgtcactaaaacaggccaaaaactgagtccttgtgttgcatagaaagcttcatgttgctaaaccaatgttaagtgaatctttggaaacaaaatgtttccaaattactgggatgtgcatgttgaaacgtgggttaaaatgactgggcagtgaaagttgactatttgccatgacataagaaataagtgtagtggctagtgtacaccctatgagtggaagggtccattttgaagtcagtggagtaagctttatgccagtttgatggtttcacaagttctattgagtgctattcagaataggaacaaggttctaatagaaaaagatggcaatttgaagtagctataaaattagactaatctacattgcttttctcctgcagagtctaataccttttatgctttgataattagcagtttgtctacttggtcactaggaatgaaactacatggtaataggcttaacaggtgtaatagcccacttactcctgaatctttaagcatttgtgcatttgaaaaatgcttttcgcgatcttcctgctgggattacaggcatgagccactgtgcctgacctcccatatgtaaaagtgtctaaaggtttttttttggttataaaaggaaaatttttgcttaagtttgaaggataggtaaaattaaaggacatgctttctgtttgtgtgatggtttttaaaaattttttttaagatggagttcttgttgcccaggctagaatgcaatggcaaaatctcactgcaatctcctcctcctgggttcaagcaattctcctacttcagcctcccaagtagctgggattacaggcatgtgctaatttggtgtttttaatagagatgaggtttttccatgttggtcaggctggtctcaaactcctgaccttaggtgatcgcctcggcctcctaaagtgctggaattacaggcatgagccaccatgcctggccaggacatgtgttcttaaggacatgctaagcaggagttaaagcagcccaagagataaggcctcttaaagtgactggcaatgtgtattgctcaagattcaaaggtacttgaattggccatagacaagtctgtaatgaagtgttatcgttttccctcatctgagtctgaattagataaaatgccttcccatcagccagtgctctgaggtatcaagtctaaattgaactagagatttttgtccttagtttctttgctatctaatgtttacacaagtaaatagtctaagatttgctggatgacagaaaaaacaggtaaggcctttaatagatggccaatagatgccctgataatgaaagttgacacctgtaagatttaccagtagagaattcttgacatgcaaggaagcaagatttaactgaaaaattgttcccactggaagcaggaatgagtcagtttacttgcatatactgagattgagattaacttcctgtgaaacccagtgtcttagacaactgtggcttgagcaccacctgctggtattcattacaaacttgctcactacaataaatgaattttaagctttaaaaaaaaaaaaaaaaaa

SEQ ID NO: 8 - DNA, 4439 bp, Homo sapiens
  60S ribosomal protein L28 transcript variant 1, L28
  CDS (43)...(534): RPL28
ctctttccgtctcaggtcgccgctgcgaagggagccgccgccatgtctgcgcatctgcaatggatggtcgtgcggaactgctccagtttcctgatcaagaggaataagcagacctacagcactgagcccaataacttgaaggcccgcaattccttccgctacaacggactgattcaccgcaagactgtgggcgtggagccggcagccgacggcaaaggtgtcgtggtggtcattaagcggagatccggccagcggaagcctgccacctcctatgtgcggaccaccatcaacaagaatgctcgcgccacgctcagcagcatcagacacatgatccgcaagaacaagtaccgccccgacctgcgcatggtgagctggggtttggggatcaggcttggggagactggccagtgctgtggggaagggcctcccactactggttgcaatatgggctggagagggatggattcttgctttcagcctactccccacacccagcattggcctagggggcggcttgtggagtgtatgggctgagccttgctctgctcccccgcccccaggcagccatccgcagggccagcgccatcctgcgcagccagaagcctgtgatggtgaagaggaagcggacccgccccaccaagagctcctgagccccctgcccccagagcaataaagtcagctggctttctcacctgcctcgactgggcctccctttttgaaacgctctggggagctctggccctgtgtgttgtcattcaggccatgtcatcaaaactctgcatgtcaccttgtccatctggaggtgatgtcaatggctggccatgcaggaggggtggggtagctgccttgtccctggtgagggcaagggtcactgtcttcacagaaaaagtttgctgacttgtgattgagacctactgtcccattgtgaggtggcctgaagaatcccagctggggcagtggcttccattcagaagaagaaaggccttttctagcccagaagggtgcaggctgagggctgggccctgggccctggtgctgtagcacggtttggggacttggggtgttcccaagacctgggggacgacagacatcacgggaggaagatgagatgacttttgcatccagggagtgggtgcagccacatttggaggggatgggctttacttgatgcaacctcatctctgagatgggcaacttggtgggtggtggcttataactgtaagggagatggcagccccagggtacagccagcaggcattgagcagccttagcattgtccccctactcccgtcctccaggtgtccccatccctcccctgtctctttgagctggctcttgtcacttaggtctcatctcagtggccgctcctgggccaccctgtcacccaagctttcctgattgcccagccctcttgtttcctttggcctgtttgctccctagtgtttattacagcttgtgaggccaggagtttgagaccatcctaggcaacataatgagacaccgtctctaaaataaaattagctgggtgtggtggtgcaccgcctgtggtcccagctcctcagaggttgagtagaggctgaggtgagcggagcacttgagccaagagtatgaggctgcagtgagcccatgagccccaccactacactccagcctggaagacaccatgacacacagtgaggcctggatggggaaagagtcctgctgttgatcctcacatgtttcctgggcacctaactctgtcagccactgccagggaccaaggatccagcatccatggcacccctggttcctgccatcctggggtacccgattcaaagaaggactctgctccctgtctgagaccacccccggctctgactgagagtaaggggactgtcagggcctcgacttgccattggttggggtcgtacggggctgggagccctgcgttttgaggcagaccactgcccttccgacctcagtcctgtctgctccagtcttgcccagctcgaaggagagcagatctgaccacttgccagcccctgtctgctgtgaattaccatttcctttgtccttcccttagttgggtctattagctcagattgagaggtgttgccttaaaactgagttgggtgacttggtacctgctcaggaccccccgcactgtcccaatcccactcaggcccacctccagctggcctcactccgctggtgacttcgtacctgctcaggagcccccactgtcccagtcccactcaggcccatctctggctggcctcactgcgctgggactccgccttcataaggagagctcactgctcacgttagtagatggccccttctcgtgaggcctctcccctggcacctgcttcagttgtcctccacagcactgatttgcagcccacaagctggcaggtttatctgtctcatgtttgtcttgtgctggtgggcaaggggtttgtctagcacaccagcatataatgagatgcttgatgaatggtgcatattgaatgtataaagcccaccggtcctgagagtttgctcactggagactttctggagatggagtctcgctctgttgcccaggctggcgagtgcaatggcgcgatcttggctcactgcagcctccacctcctgggttcaagcgattctcctgcctcagcctcccgagtagctgggattacaggtgggtgtcaccacacccagctcagtattgtatttttagcagagatggggtttcaccattttgcccaggctggtttggaactcctgacttcaaattacccacctgcctcagcctcccaaagtgctggcattacaggcgctcgaggctttctgatgtggctgctgctgctcagaaggccttgtccttaaccacctccttgcctgccctggaggcttgtgcctctaggccccaccccctgtggagtcctgctggctttctccatccctatctgaatcctccctgctgtgtggcctcccctggtctcatccgtaacacagcccagcttagtgggcctctgttcctgcgggtggccagcctgtctgtgtggctgggctggggaggccacgtctggtatctgaatgctatcggtgggttggggtggaggaaccaggagagggctggagggagggagatggtctcagccccacagagtttggagtcctcagtgtgctgagcaaacgtggagacaccatttccctcctctagacctcatcttggagagagagatgttggatggggccatctattccagctttattcacacaaatcatgtctgttggcctggaaattggaaaaccagttaaaccaaaaacatgatattaagaaaacaggcaggctcaccatagtaaaaatgctgaaagccaaagacaaaattgggagaacaaaagaaaagcgtcttgtcacatacagaaggtccctgataaagttagtagctgccctcatcagaaaccaggcccaggcagtggggacacatccagagtgctgaaagaacctcccccaggtcatcctatccccaagagtgatgcccggcagcattcccagctcagggctaatggttcacggaagccaggaatcaaactgcctgggttccagtcccagctctgccagttatgcccagctgtggggacttgggcagctcgtttagtagcaccgtgcctcagtttcccatatgtaaaaggccattttgagtgcctttcacagccctgcataaggcaggtgtctcagtgttcactgctgtctctccagctcttagtccagtagctgcatggtgagtgagcgtagggcgcaccctggaaggctgccaagcccaaagttgtgcagagcgctggggactccagactccccacagcagcagagactcgggactgaggcatcctctgttcacaggacatgctggcatctactgggtcagggctctgctgctcggtggctgtgcaaccttgggcaagttcctcaacctctctgtgtcttcgtaccctcatctgtaacatgcgtgtcgatagaccctactactcagggttgatgagaagattaaatgtgcaaaacctgcttgactgtgcccacaaatcctgattgtaggaataaattaatgactttttataaatattttgatcagatggactcatgatcacagatgtcttcacatgcctatgactaatttgtacacaaactaatgctcgtgtttcccaagcacctggaagacatgccagatccatgtgcagtaatgcctggtggctccaggtctgccccgccgtcctgtggggctgtgagctttcccagcctcctgcccgtgtttgtgaatatcattctgtcctcagctgcatttccagcccaggctgtttggcgctgcccaggaatggtatcaattcccctgtttctcttgtagccagttactagaataaaatcatctactttaaaaaaaaaaaaaaaaaaaaaaaaaaaaaaaaaaaaaaaa

SEQ ID NO: 9 - DNA, 401 bp, Homo sapiens
  40S ribosomal protein S28, S28
  CDS (32)...(241): RPS28
ctctccgccagaccgccgccgcgccgccatcatggacaccagccgtgtgcagcctatcaagctggccagggtcaccaaggtcctgggcaggaccggttctcagggacagtgcacgcaggtgcgcgtggaattcatggacgacacgagccgatccatcatccgcaatgtaaaaggccccgtgcgcgagggcgacgtgctcacccttttggagtcagagcgagaagcccggaggttgcgctgagcttggctgctcgctgggtcttggatgtcgggttcgaccacttggccgatgggaatggtctgtcacagtctgctccttttttttgtccgccacacgtaactgagatgctcctttaaataaagcgtttgtgtttcaagttaaaaaaaaaaaaaaaaaaaaa

SEQ ID NO: 10 - DNA, 361 bp, Homo sapiens
  40S ribosomal protein S27, S27, metallopan-stimulin 1, metallopanstimulin 1 (MPS-1, MPS1)
  CDS (35)...(289): RPS27
ctttccggcggtgacgacctacgcacacgagaacatgcctctcgcaaaggatctccttcatccctctccagaagaggagaagaggaaacacaagaagaaacgcctggtgcagagccccaattcctacttcatggatgtgaaatgcccaggatgctataaaatcaccacggtctttagccatgcacaaacggtagttttgtgtgttggctgctccactgtcctctgccagcctacaggaggaaaagcaaggcttacagaaggatgttccttcaggaggaagcagcactaaaagcactctgagtcaagatgagtgggaaaccatctcaataaacacattttggataaatcctgaaaaaaaaaa

SEQ ID NO: 11 - DNA, 918 bp, Homo sapiens
  60S ribosomal protein L34 transcript variant 1, L34, leukemia-associated protein
  CDS (45)...(398): RPL34
cttttttcttcctcttccggggacgttgtctgcaggcactcagaatggtccagcgtttgacataccgacgtaggctttcctacaatacagcctctaacaaaactaggctgtcccgaacccctggtaatagaattgtttacctttataccaagaaggttgggaaagcaccaaaatctgcatgtggtgtgtgcccaggcagacttcgaggggttcgtgctgtaagacctaaagttcttatgagattgtccaaaacaaagaaacatgtcagcagggcctatggtggttccatgtgtgctaaatgtgttcgtgacaggatcaagcgtgctttccttatcgaggagcagaaaatcgttgtgaaagtgttgaaggcacaagcacagagtcagaaagctaaataaaaaaatgaaacttttttgagtaataaaaatgaaaagacgctgtccaatagaaaaagttggtgtgctggagctacctcacctcagcttgagagagccagttgtgtgcatctctttccagttttgcatccagtgacgtctgcttggcatcttgagattgttatggtgagagtatttacacctcagcaaatgctgcaaaatcctgttttcccccagagagctggaggttaaatactaccagcacatccctagatactactcaagttacagtatatgatcactaatatagtatgctcttggtaccaggagctctgatatatatctggtacatgtttgataatgacttgattgttattataagtacttattaatacttcgattctgtaaagagtttagggtttgattttataaaatccaaaatgagccttttattgaatccagttctctatgtgaccagttctctgtatgaatggaagggaaaagaattaaaaatcttgcaaaggggaaaaaaaaaaaaaaaaaa

SEQ ID NO: 12 - DNA, 4906 bp, Homo sapiens
  60S ribosomal protein L27a, L27A
  CDS (367)...(813): RPL27A
aacgaggcccttagggtcggcttaggcggttccctgaccaaggcgccagaaaagggcctggctcaagcaagcacgggcggcgtgcagtacagcacacctagccccgattcttcaacagttctcgccctccgagcctagcacaacgagcctcaccgaaaccgtacaccgccaccaggacactccgtgatgggggatcaccaccctcagaaagaggaagcgactagcaggcgcgcaatcccgcgagaccaggaggccccgcccgaagcccggcctctgtgaccggaagtgaggcgttttgccccgcccccgtggccgatacctcgcgagacttggcgaaggccttcctttttcgtctgggctgccaacatgccatccagactgaggaagacccggaaacttaggggccacgtgagccacggccacggccgcataggcaagcaccggaagcaccccggcggccgcggtaatgctggtggtctgcatcaccaccggatcaacttcgacaaataccacccaggctactttgggaaagttggtatgaagcattaccacttaaagaggaaccagagcttctgcccaactgtcaaccttgacaaattgtggactttggtcagtgaacagacacgggtgaatgctgctaaaaacaagactggggctgctcccatcattgatgtggtgcgatcgggctactacaaagttctgggaaagggaaagctcccaaagcagcctgtcatcgtgaaggccaaattcttcagcagaagagctgaggagaagattaagagtgttgggggggcctgtgtcctggtggcttgaagccacatggagggagtttcattaaatgctaactactttttccttgtggtgtgagtgtaggttcttcagtggcacctctacatcctgtgtgcattgggagcccaggttctagtacttagggtatgaagacatggggtcctctcctgacttccctcaaatatatggtaaacgtaagaccaacacagacgttggccagttaaacatttctgtttataaagtcagaataatacctgttgatcactgaaaggcctgcatgtattgtactctgaattttacagtgaatgagagaatgtaccctaattgttcaacagggctcaaaaggaaagattccattttgatgggtcacattctaaagaggggcagtgtgataggaatgagatggtcctttaggacttaagttctcagcccaaggtttttccacgtggccccctcatcttttttttttttttaaacggagtctctcttgccaggctggagtgcagtggcacgatctcggctcactgcagcctccgcctcccaggttaagcgattctcctgcctcagcttcctgactaactgggattacaggcgcccaccaccatgcccagctaatttttgtattttcagtagagatggggtttcaccatgttggccatgctggtctctaactcctaacctcaagtgatctgcccacatcggcctccaaaagttctgggattatagtgtgagccactgcgcccggccatggctccttaatcttgatccaaattattgttacatccagaatgtgatgaatcaaaatctcgagatgggggtccagcaatctgaaatttcagtatgccagggcttttctgtatgtcaaagtgggtttgaaatagttaatttttcttctagtctgaaatgtatcgggaaaatttggaaatcctgaaggctggaaattgaaataagtttttctaggatttgtgtctcttgctattggaaaactgatggtgaccaattcatgtttacaaataagatcctcatagatctcggtaaattataatttgctacagttttatggttcttcctgtgattttgagctttttttgacccaaaataatacagtctaaaactatagacaaataagatggcacttagactcctgggttttagttagtggaggtttccttagtgcactgtggggtcataataagccgagaaccatggctgtctatgggacacatctgtcaggacaacctttagaggatgttggggatcaaatagaaggcacagagaagcactgaattggcttacataagaataggctagaattacaagtagtgaaacctcgattcagctggacaattttaaacaaatgtatcatttggcttgtatcttctgttgtgctggagaagttagaaataagggctctccagaccagcctgaccaacctggagaaaccttgtctctactaaatacacaaaattagccaggcgtggtggcacatgcctgtaatcccagctactttggaggctgagccaggagaatctccaggaggcggaggttgctgtgagccgagatcgtgccattgcactccagcttgggcaacaagagtgaaactctgtccaccccccccaaaaaaagtaagggctctccattagggcccatagaggacttgtaatatggaacctgaatccaaggatcccacaataagtggtcagtagttcatgatgaattaaaagactcaatatttggtcttcacccaatacctgtgtgacttttagtcctaatttcctcatctttaaaatttcagtgaaagtgcctacctgaggattgtgtagattaaaatggaaaccgtgcacttaattttttgttttgttttgagacggagtctcgctctgtcgcccaggctggagtgcagtggtgcgatctcagatcactgcaagctccgcctcctaggttcagaccattctcctgcctcagcttcccaagtagctgggactacaggcgcccgccactgcgcccggctaattttttgcatttttagtagagacagggtttcaccgtgttagccaggatggtctcgatctcctgatctgcccgcctcagcctcccaaagtgctgggattacaggcatgagccaccgcgcccggcccaggcacttaatttttgtgtttgacttagtaacttaagtgcaaactattacgggagcagatggagtcaattggccttcatgtgattgtcagtgggaaattggtccaagcagagggaatactggttcaggaaactggtttgggaaggttaggcaaacgggaagtgctatggtggagagaaagattactctggccgggctgtaaaggacggctacaatgggaggctgaaggcagaaccaagaaaatgggagtgagtatggaaaaggtacgattcagacggcataatggacgggacttggagactgaattgtagtgggccgaccacaaaatgataaggcatggaaggaagtagagtttggggggaaggatccctagtcccttaatggctaccttcttccccaggagttgttaggccatccgatcccctggcctgggaaagaaacactgatttcgttgctggcttgttcactcaccagaagctacagctactaacagttctaaaaactgtttcatgtgatgaggaacagacgaaaatagttttgagccctaagtccgccgattccagtgctttcttgaacccgcatttactaaaatattttcatgactgccaagctttgaatagcctgctgtgttcatggaggctcatactggcgatctctagtggctggctaaagcttgaattgcaaaagatctaatttctggtctaatgtatatatgccttaaatatagttgcgttcaaacgtgggagctgcaggtgcaacttgattttatgacaaatggctgccacataatttgcacaagcagtgctcgtcaagggcagctaaatcaggcgagctttcaatcaaaataaatgtactactaaaccctacttagcggctaactagcccaagagcagacagcccacggacggactgcaagtcggaagcgcgggcggaagctgtgcagcgcccacctggtggctccatcggccgcgttcatcagtcagcacgacccgacctcagtggcgtcctcacaacacagaccggaccttgggtcttaccccggcacctgagaaccacttccggtgagtagcttctacttccggagacgatgactcccccgcgtcccagaccggaagaagcccggcggagaccggcctcgctcggccacttccggcaagggcggagccggccagtggtgcgcgagcgcagataactcccctggagaggcgggatgttcaactccacccctggtccttgggcggccgtgggtccccttcgaagcggaggaatggccaacctcgccgcacttcgagcccctttagggtgcgtttaagaacagtgggcgtggcctttacgtaaatcttcgagatgggaacctccagaatttgtctcaattgtctaaaaggtaatgagcgtcagcgacattcaagggcactttgggctaaaaaagaaagtgcttgtacacggatggaaatattctagaagaacataaaaggaatttcctcttaggaggttagggaaatgagcacgaagtatgttttggtgcagttttttgttcaacccaatgcgtattttcatattgagaggcaatataaatggagcgaaagtatcttgagaaaaaaaaaaaaactaccagaacttgccgttgctgaaaagtaatattttctctttcgagagttttcatggccttttaaattacacccccacctccacaggcaaataaatttgttttggaatgcataccacatcatctggctctagaaacgtattttgtgtagctcccctagcaagaatataggttaaagcgtaaatttaattcctggctctattttacatcccaatttttattttcctctcattcccactttacgttgtttcaaataacctagtttgtgtatccctgtaagtcattttggtataaagtaggttataagtgtacatgcgaaaagatgtttttaacaaaaatgtaactgaaaaaaaaaaaaaaaaaaaaaaaaaaaa

SEQ ID NO: 13 - DNA, 2335 bp, Homo sapiens
  60S ribosomal protein L10 transcript variant 1, L10, laminin receptor homolog, tumor suppressor QM (QM), Wilms tumor-related protein, AUTSX5, DXS648, DXS648E, NOV
  CDS (189)...(833): RPL10
gggctacgcccgggcgcaagcgccaagagcggctgcgtctatggtcatgacgtctgacagagcgtccacccgtcttcgacaggactctatggttcttacgcgcgcagacagaccgcctatataagccatgcgcaggcggaggagcgcctctttcccttcggtgtgccactgaagatcctggtgtcgccatgggccgccgccccgcccgttgttaccggtattgtaagaacaagccgtacccaaagtctcgcttctgccgaggtgtccctgatgccaagattcgcatttttgacctggggcggaaaaaggcaaaagtggatgagtttccgctttgtggccacatggtgtcagatgaatatgagcagctgtcctctgaagccctggaggctgcccgaatttgtgccaataagtacatggtaaaaagttgtggcaaagatggcttccatatccgggtgcggctccaccccttccacgtcatccgcatcaacaagatgttgtcctgtgctggggctgacaggctccaaacaggcatgcgaggtgcctttggaaagccccagggcactgtggccagggttcacattggccaagttatcatgtccatccgcaccaagctgcagaacaaggagcatgtgattgaggccctgcgcagggccaagttcaagtttcctggccgccagaagatccacatctcaaagaagtggggcttcaccaagttcaatgctgatgaatttgaagacatggtggctgaaaagcggctcatcccagatggctgtggggtcaagtacatccccaatcgtggccctctggacaagtggcgggccctgcactcatgagggcttccaatgtgctgcccccctcttaatactcaccaataaattctacttcctgtccacctatgtctttgtatctacattcttgacggggaaggaacttcctctgggaacctttgggtcattgccctttcacttcagaaacaggttgacaactcagccctgctcatgaggcagcaaaccctgcaaagggctgggactggtggccttatgtcagttgtctactctggagcttgacttggacctccccaggtcctaggcagtaggttgaaaaacactgaagtgcttttcatgaagcacagctgcagcaaagccttgcaatcccaggctggggtcagcctacagttgtgttgcttattacaacacatgcggaccaagaggggcttgtgggctagaggctgaccagcagcgtttatttagcaagggtaggtgtgcatcacattgggcttgttctcacccatctggtttggccattcctccttggtgggaatcatccaggtactgctgaggtcacctgcgatttgccccatttcctatctctagcaacctcctgggccccatgcccccaccccttctagaacctgcattcccagggccttcaccacctgaccaaaggtctaggctaacctttggtcatttgtaacaagacctcggaacagacacgtgtgtggcatggtttggcctggggatcttagatgtctgacctgaactattgtagaacagcgctggcttttgggggagcagcaaaaatgagaggagtgctaggtgggtggcctgagcatctgtatccagggacaggactccaaaggcttttggtcccagagctggggtatgttggccccagcccccagcctgtggctcccaaaaggcctctggttttttgtaatctcagtttacagccatttcttaggtttttaattacctttattttattttgccaaacatacctgggaataccttttattttttttttaccttggggtgatggttccaaaccataaatgtgattatagttaacacatgacccttctagcgtcccagccagtgtttttcctgacctctgttctttggagaggaggatggaagggaggggtccggcacgctgctggcattttgctgtgtcctgcagcccctttccgggacacctgggttcacacagctttttagcttacataactggtgcagattttctgtgtggagatgttgccttgaccagccttggctggactttaccaggcatgcagaagcctgtaccaacacagactacagcacccaggaggtgcgagtgtggctgctcagcggttataacaggcctgactgcattgttcaccggattataatgagccaaaatgtttcccggtgtttgctggtttcagggaaggagtttgatatagcagattaaccaccctccttgtagctattggggcttaatggtttcctggtgattcttaccaatccacaataaacatggcccattggcatatctgcaaaaaaaaaaaaaaaaa

SEQ ID NO: 14 - DNA, 2381 bp, Homo sapiens
  eukaryotic translation elongation factor 1 delta (guanine nucleotide exchange protein) (EEF1D, EF-1D, EF1D, EF-1-delta) transcript variant 3, antigen NY-CO-4, FP1047
  CDS (343)...(2286): EEF1D
gacaccactggccgcgaagcgcagggggggcgcgcgcgctgccgcccgttcccagcacttgtgcagactcctccggggaagagcggcctccgcggtcatctccaacggaattctgcctttgaagtgtcggggcacggcgcgtcgagggtcctggcggccaggcggggcgtgtgcaagggtcgcgtcccccccccgggcccccggcccgtggctcttggtagagcccagtgcttcatttcccgtgcgcggcccgggcggccctccctttcatcagtcttcccgcgtccgccgattcctcctccttggtcgccgcgtccttggctggcgtgaggccaaagcaaaatgaggagcgggaaggcctcctgcaccctggagaccgtgtgggaagacaagcacaagtatgaggaggccgagcggcgcttctacgaacacgaggccacacaggcggccgcctccgcccagcagctgccagccgaggggccagccatgaatgggcccggccaggacgaccctgaggacgctgatgaggcggaagcccctgacggcggcagcaggcgtgatcccaggaagagccaggacagcaggaagcccctgcagaaaaagaggaagcgctcccccaagagcgggctcggccccgcggacctggccctcctgggcctctcggccgaacgcgtgtggctggacaagtcacttttcgaccaggcagagagctcctaccgccagaagctggcagatgtggctgcccaggcagcctggcctcctgccttggccccttggggtctctgcacccatggaaaccaggtggcctgccaccacgtgacctgggggatctgggtcaacaagtcctccttcgaccaggctgagcgggccttcgtggagtggtctcaggccctgttgctggcccccgagggcagccgcaggcaggggactcccaacacaggccagcaggtggccgtccccgacctggcccaccagcccagcccaccggtcaatggccagcccccgctgggcagcctgcaggcactggttcgggaggtgtggctggagaagccccggtatgatgcagccgagaggggcttctacgaggccctgtttgacggccatcccccagggaaggtgcgcctgcaagagcgagccggcctggccgagggtgcccggcggggccgcagagaccggcggggccgcaacatcttagggaacaagcgggccgggctgcgacgggccgatggggaggccccctctgccttgccctactgttacttcctgcagaaggatgcagaggccccctggctcagcaagcctgcctacgacagcgccgagtgccgccaccacgctgccgaggccctgcgggtggcctggtgcctcgaagctgcctccctgtctcaccgacccggtcctcggtctggcctgtccgtgtccagcctgagacccaacagaaaaatggctacaaacttcctagcacatgagaagatctggttcgacaagttcaaatatgacgacgcagaaaggagattctacgagcagatgaacgggcctgtggcaggtgcctcccgccaggagaacggcgccagcgtgatcctccgtgacattgcgagagccagagagaacatccagaaatccctggctggaagctcaggccccggggcctccagcggcaccagcggagaccacggtgagctcgtcgtccggattgccagtctggaagtggagaaccagagtctgcgtggcgtggtacaggagctgcagcaggccatctccaagctggaggcccggctgaacgtgctggagaagagctcgcctggccaccgggccacggccccacagacccagcacgtatctcccatgcgccaagtggagcccccagccaagaagccagccacaccagcagaggatgacgaggatgatgacattgacctgtttggcagtgacaatgaggaggaggacaaggaggcggcacagctgcgggaggagcggctacggcagtacgcggagaagaaggccaagaagcctgcactggtggccaagtcctccatcctgctggatgtcaagccttgggatgatgagacggacatggcccagctggaggcctgtgtgcgctctatccagctggacgggctggtctggggggcttccaagctggtgcccgtgggctacggtatccggaagctacagattcagtgtgtggtggaggacgacaaggtggggacagacttgctggaggaggagatcaccaagtttgaggagcacgtgcagagtgtcgatatcgcagctttcaacaagatctgaagcctgagtgtgtgtacgtgcgcgcgtgcgtgaggccctgccacgattaaagactgagaccggccctctggctccgtcctggtcatttcctgctc

SEQ ID NO: 15 - DNA, 1523 bp, Homo sapiens
  glioma tumor suppressor candidate region gene 2 (GLTSCR2), protein interacting with carboxyl terminus 1 (PICT-1, PICT1), p60
  CDS (25)...(1461): GLTSCR2
tggctgagttcttcctttgacaagatggcggcaggaggcagtggcgttggtgggaagcgcagctcgaaaagcgatgccgattctggtttcctggggctgcggcccacttcggtggacccagcgctgaggcggcggcggcgaggcccaagaaataagaagcggggctggcggcggcttgctcaggagccgctggggctggaggttgaccagttcctggaagacgtgcggctacaggagcgcacgagcggtggcttgttgtcagaggccccaaatgaaaaactcttcttcgtggacactggctccaaggaaaaagggctgacaaagaagagaaccaaagtccagaagaagtcactgcttctcaagaaaccccttcgggttgacctcatcctcgagaacacatccaaagtccctgcccccaaagacgtcctcgcccaccaggtccccaacgccaagaagctcaggcggaaggagcagctatgggagaagctggccaagcagggcgagctgccccgggaggtgcgcagggcccaggcccggctcctcaacccttctgcaacaagggccaagcccgggccccaggacaccgtagagcggcccttctacgacctctgggcctcagacaaccccctggacaggccgttggttggccaggatgagtttttcctggagcagaccaagaagaaaggagtgaagcggccagcacgcctgcacaccaagccgtcccaggcacccgccgtggaggtggcgcctgccggagcttcctacaatccatcctttgaagaccaccagaccctgctctcagcggcccacgaggtggagttgcagcggcagaaggaggcggagaagctggagcggcagctggccctgcccgccacggagcaggccgccacccaggagtccacattccaggagctgtgcgaggggctgctggaggagtcggatggtgagggggagccaggccagggcgaggggccggaggctggggatgccgaggtctgtcccacgcccgcccgcctggccaccacagagaagaagacggagcagcagcggcggcgggagaaggctgtgcacaggctgcgggtacagcaggccgcgttgcgggccgcccggctccggcaccaggagctgttccggctgcgcgggatcaaggcccaggtggccctgaggctggcggagctggcgcggcggcagaggcggcggcaggcgcggcgggaggctgaggctgacaagccccgaaggctggggcggctcaagtaccaggcacctgacatcgacgtgcagctgagctcggagctgacagactcgctcaggaccctgaagcccgagggcaacatccttcgagaccggttcaagagcttccagaggaggaatatgatcgagcctcgagagagagccaagttcaaacgcaagtacaaggtgaagctggtggagaagcgggcgttccgtgagatccagttgtagctgccatcagatgccggagactcgcccttcaataaaaaatctcttctagctgatcagtggga

SEQ ID NO: 16 - DNA, 1348 bp, Homo sapiens
  60S ribosomal protein L3 transcript variant 1, L3, HIV-1 TAR RNA-binding protein B (TARBP-B), ASC-1
  CDS (69)...(1280): RPL3
ccagatttggctttatatagcggacccgtaaggccgaccggcctctaccggcgggatttgatggcgtgatgtctcacagaaagttctccgctcccagacatgggtccctcggcttcctgcctcggaagcgcagcagcaggcatcgtgggaaggtgaagagcttccctaaggatgacccgtccaagccggtccacctcacagccttcctgggatacaaggctggcatgactcacatcgtgcgggaagtcgacaggccgggatccaaggtgaacaagaaggaggtggtggaggctgtgaccattgtagagacaccacccatggtggttgtgggcattgtgggctacgtggaaacccctcgaggcctccggaccttcaagactgtctttgctgagcacatcagtgatgaatgcaagaggcgtttctataagaattggcataaatctaagaagaaggcctttaccaagtactgcaagaaatggcaggatgaggatggcaagaagcagctggagaaggacttcagcagcatgaagaagtactgccaagtcatccgtgtcattgcccacacccagatgcgcctgcttcctctgcgccagaagaaggcccacctgatggagatccaggtgaacggaggcactgtggccgagaagctggactgggcccgcgagaggcttgagcagcaggtacctgtgaaccaagtgtttgggcaggatgagatgatcgacgtcatcggggtgaccaagggcaaaggctacaaaggggtcaccagtcgttggcacaccaagaagctgccccgcaagacccaccgaggcctgcgcaaggtggcctgtattggggcatggcatcctgctcgtgtagccttctctgtggcacgcgctgggcagaaaggctaccatcaccgcactgagatcaacaagaagatttataagattggccagggctaccttatcaaggacggcaagctgatcaagaacaatgcctccactgactatgacctatctgacaagagcatcaaccctctgggtggctttgtccactatggtgaagtgaccaatgactttgtcatgctgaaaggctgtgtggtgggaaccaagaagcgggtgctcaccctccgcaagtccttgctggtgcagacgaagcggcgggctctggagaagattgaccttaagttcattgacaccacctccaagtttggccatggccgcttccagaccatggaggagaagaaagcattcatgggaccactgaagaaagaccgaattgcaaaggaagaaggagcttaatgccaggaacagattttgcagttggtggggtctcaataaaagttattttccactgacaaaaaaaaaaa

SEQ ID NO: 17 - DNA, 2869 bp, Homo sapiens
  poly(A) binding protein, cytoplasmic 1 (PABPC1, PAB1, PABP1, PABPL1), poly(A) binding protein, cytoplasmic 2 (PABPC2), polyadenylate-binding protein 1 (PABP)
  CDS (505)...(2415): PABPC1
cccttctccccggcggttagtgctgagagtgcggagtgtgtgctccgggctcggaacacacatttattattaaaaaatccaaaaaaaatctaaaaaaatcttttaaaaaaccccaaaaaaatttacaaaaaatccgcgtctcccccgccggagacttttattttttttcttcctcttttataaaataacccggtgaagcagccgagaccgacccgcccgcccgcggccccgcagcagctccaagaaggaaccaagagaccgaggccttcccgctgcccggacccgacaccgccaccctcgctccccgccggcagccggcagccagcggcagtggatcgaccccgttctgcggccgttgagtagttttcaattccggttgatttttgtccctctgcgcttgctccccgctcccctccccccggctccggcccccagccccggcactcgctctcctcctctcacggaaaggtcgcggcctgtggccctgcgggcagccgtgccgagatgaaccccagtgcccccagctaccccatggcctcgctctacgtgggggacctccaccccgacgtgaccgaggcgatgctctacgagaagttcagcccggccgggcccatcctctccatccgggtctgcagggacatgatcacccgccgctccttgggctacgcgtatgtgaacttccagcagccggcggacgcggagcgtgctttggacaccatgaattttgatgttataaagggcaagccagtacgcatcatgtggtctcagcgtgatccatcacttcgcaaaagtggagtaggcaacatattcattaaaaatctggacaaatccattgataataaagcactgtatgatacattttctgcttttggtaacatcctttcatgtaaggtggtttgtgatgaaaatggttccaagggctatggatttgtacactttgagacgcaggaagcagctgaaagagctattgaaaaaatgaatggaatgctcctaaatgatcgcaaagtatttgttggacgatttaagtctcgtaaagaacgagaagctgaacttggagctagggcaaaagaattcaccaatgtttacatcaagaattttggagaagacatggatgatgagcgccttaaggatctctttggcaagtttgggcctgccttaagtgtgaaagtaatgactgatgaaagtggaaaatccaaaggatttggatttgtaagctttgaaaggcatgaagatgcacagaaagctgtggatgagatgaacggaaaggagctcaatggaaaacaaatttatgttggtcgagctcagaaaaaggtggaacggcagacggaacttaagcgcaaatttgaacagatgaaacaagataggatcaccagataccagggtgttaatctttatgtgaaaaatcttgatgatggtattgatgatgaacgtctccggaaagagttttctccatttggtacaatcactagtgcaaaggttatgatggagggtggtcgcagcaaagggtttggttttgtatgtttctcctccccagaagaagccactaaagcagttacagaaatgaacggtagaattgtggccacaaagccattgtatgtagctttagctcagcgcaaagaagagcgccaggctcacctcactaaccagtatatgcagagaatggcaagtgtacgagctgttcccaaccctgtaatcaacccctaccagccagcacctccttcaggttacttcatggcagctatcccacagactcagaaccgtgctgcatactatcctcctagccaaattgctcaactaagaccaagtcctcgctggactgctcagggtgccagacctcatccattccaaaatatgcccggtgctatccgcccagctgctcctagaccaccatttagtactatgagaccagcttcttcacaggttccacgagtcatgtcaacacagcgtgttgctaacacatcaacacagacaatgggtccacgtcctgcagctgcagccgctgcagctactcctgctgtccgcaccgttccacagtataaatatgctgcaggagttcgcaatcctcagcaacatcttaatgcacagccacaagttacaatgcaacagcctgctgttcatgtacaaggtcaggaacctttgactgcttccatgttggcatctgcccctcctcaagagcaaaagcaaatgttgggtgaacggctgtttcctcttattcaagccatgcaccctactcttgctggtaaaatcactggcatgttgttggagattgataattcagaacttcttcatatgctcgagtctccagagtcactccgttctaaggttgatgaagctgtagctgtactacaagcccaccaagctaaagaggctgcccagaaagcagttaacagtgccaccggtgttccaactgtttaaaattgatcagggaccatgaaaagaaacttgtgcttcaccgaagaaaaatatctaaacatcgaaaaacttaaatattatggaaaaaaaacattgcaaaatataaaataaataaaaaaaggaaaggaaactttgaaccttatgtaccgagcaaatgccaggtctagcaaacataatgctagtcctagattacttattgatttaaaaacaaaaaaacacaaaaaaatagtaaaatataaaaacaaattaatgttttatagaccctgggaaaaagaattttcagcaaagtacaaaaatttaaagcattcctttctttaattttgtaattctttactgtggaatagctcagaatgtcagttctgttttaagtaacagaattgataactgagcaaggaaacgtaatttggattataaaattcttgctttaataaaaattccttaaacagtgaaaaaaaaa

SEQ ID NO: 18 - DNA, 434 bp, Homo sapiens
  60S ribosomal protein L37a, L37A
  CDS (79)...(357): RPL37A
acttccgctcgtccgcctaataccgcgcctgcgcaccgcgtctcttcctttctgggctcggacctaggtcgcggcgacatggccaaacgtaccaagaaagtcgggatcgtcggtaaatacgggacccgctatggggcctccctccggaaaatggtgaagaaaattgaaatcagccagcacgccaagtacacttgctctttctgtggcaaaaccaagatgaagagacgagctgtggggatctggcactgtggttcctgcatgaagacagtggctggcggtgcctggacgtacaataccacttccgctgtcacggtaaagtccgccatcagaagactgaaggagttgaaagaccagtagacgctcctctactctttgagacatcactggcctataataaatgggttaatttatgtaacaaaaaaaaaaaaaaaaaa

SEQ ID NO: 19 - DNA, 755 bp, Homo sapiens
  40S ribosomal protein S5, S5
  CDS (73)...(687): RPS5
ctcttcctgtctgtaccagggcggcgcgtggtctacgccgagtgacagagacgctcaggctgtgttctcaggatgaccgagtgggagacagcagcaccagcggtggcagagaccccagacatcaagctctttgggaagtggagcaccgatgatgtgcagatcaatgacatttccctgcaggattacattgcagtgaaggagaagtatgccaagtacctgcctcacagtgcagggcggtatgccgccaaacgcttccgcaaagctcagtgtcccattgtggagcgcctcactaactccatgatgatgcacggccgcaacaacggcaagaagctcatgactgtgcgcatcgtcaagcatgccttcgagatcatacacctgctcacaggcgagaaccctctgcaggtcctggtgaacgccatcatcaacagtggtccccgggaggactccacacgcattgggcgcgccgggactgtgagacgacaggctgtggatgtgtcccccctgcgccgtgtgaaccaggccatctggctgctgtgcacaggcgctcgtgaggctgccttccggaacattaagaccattgctgagtgcctggcagatgagctcatcaatgctgccaagggctcctcgaactcctatgccattaagaagaaggacgagctggagcgtgtggccaagtccaaccgctgattttcccagctgctgcccaataaacctgtctgccctttggggcagtcccagccaaaaaaaaaaaaaaa

SEQ ID NO: 20 - DNA, 582 bp, Homo sapiens
  60S ribosomal protein L21, L21
  CDS (44)...(526): RPL21
tttcctttcggccggaaccgccatcttccagtaattcgccaaaatgacgaacacaaagggaaagaggagaggcacccgatatatgttctctaggccttttagaaaacatggagttgttcctttggccacatatatgcgaatctataagaaaggtgatattgtagacatcaagggaatgggtactgttcaaaaaggaatgccccacaagtgttaccatggcaaaactggaagagtctacaatgttacccagcatgctgttggcattgttgtaaacaaacaagttaagggcaagattcttgccaagagaattaatgtgcgtattgagcacattaagcactctaagagccgagatagcttcctgaaacgtgtgaaggaaaatgatcagaaaaagaaagaagccaaagagaaaggtacctgggttcaactaaagcgccagcctgctccacccagagaagcacactttgtgagaaccaatgggaaggagcctgagctgctggaacctattccctatgaattcatggcataataggtgttaaaaaaaaaaataaaggacctctgggctacaaaaaaaaaaaaaaaaaa

SEQ ID NO: 21 - DNA, 488 bp, Homo sapiens
  40S ribosomal protein S15a transcript variant 1, S15a
  CDS (31)...(423): RPS15A
ctctttccgccatctttccgcgccgccacaatggtgcgcatgaatgtcctggcagatgctctcaagagtatcaacaatgccgaaaagagaggcaaacgccaggtgcttattaggccgtgctccaaagtcatcgtccggtttctcactgtgatgatgaagcatggttacattggcgaatttgaaatcattgatgaccacagagctgggaaaattgttgtgaacctcacaggcaggctaaacaagtgtggggtgatcagccccagatttgacgtgcaactcaaagacctggaaaaatggcagaataatctgcttccatcccgccagtttggtttcattgtactgacaacctcagctggcatcatggaccatgaagaagcaagacgaaaacacacaggagggaaaatcctgggattctttttctagggatgtaatacatatatttacaaataaaatgcctcatggactctggtgcttccaaaaaaaaaaaa

SEQ ID NO: 22 - DNA, 1125 bp, Homo sapiens
  guanine nucleotide binding protein (G protein), beta polypeptide 2-like 1 (GNB2L1), cell proliferation-inducing gene 21 protein (PIG21), receptor of activated protein kinase C 1 (RACK1), lung cancer oncogene 7 (HLC-7), H12.3
  CDS (107)...(1060): GNB2L1
ctctctttcactgcaaggcggcggcaggagaggttgtggtgctagtttctctaagccatccagtgccatcctcgtcgctgcagcgacacacgctctcgccgccgccatgactgagcagatgacccttcgtggcaccctcaagggccacaacggctgggtaacccagatcgctactaccccgcagttcccggacatgatcctctccgcctctcgagataagaccatcatcatgtggaaactgaccagggatgagaccaactatggaattccacagcgtgctctgcggggtcactcccactttgttagtgatgtggttatctcctcagatggccagtttgccctctcaggctcctgggatggaaccctgcgcctctgggatctcacaacgggcaccaccacgaggcgatttgtgggccataccaaggatgtgctgagtgtggccttctcctctgacaaccggcagattgtctctggatctcgagataaaaccatcaagctatggaataccctgggtgtgtgcaaatacactgtccaggatgagagccactcagagtgggtgtcttgtgtccgcttctcgcccaacagcagcaaccctatcatcgtctcctgtggctgggacaagctggtcaaggtatggaacctggctaactgcaagctgaagaccaaccacattggccacacaggctatctgaacacggtgactgtctctccagatggatccctctgtgcttctggaggcaaggatggccaggccatgttatgggatctcaacgaaggcaaacacctttacacgctagatggtggggacatcatcaacgccctgtgcttcagccctaaccgctactggctgtgtgctgccacaggccccagcatcaagatctgggatttagagggaaagatcattgtagatgaactgaagcaagaagttatcagtaccagcagcaaggcagaaccaccccagtgcacctccctggcctggtctgctgatggccagactctgtttgctggctacacggacaacctggtgcgagtgtggcaggtgaccattggcacacgctagaagtttatggcagagctttacaaataaaaaaaaaactggcttttctgacaaaaaaaaaaaaaaaa

SEQ ID NO: 23 - DNA, 644 bp, Homo sapiens
  60S ribosomal protein L11 transcript variant 1, L11, cell growth-inhibiting protein 34 (GIG34), CLL-associated antigen KW-12, DBA7
  CDS (46)...(582): RPL11
aaggccctcggccggaagctccgctttctcttcctgctctccatcatggcgcaggatcaaggtgaaaaggagaaccccatgcgggaacttcgcatccgcaaactctgtctcaacatctgtgttggggagagtggagacagactgacgcgagcagccaaggtgttggagcagctcacagggcagacccctgtgttttccaaagctagatacactgtcagatcctttggcatccggagaaatgaaaagattgctgtccactgcacagttcgaggggccaaggcagaagaaatcttggagaagggtctaaaggtgcgggagtatgagttaagaaaaaacaacttctcagatactggaaactttggttttgggatccaggaacacatcgatctgggtatcaaatatgacccaagcattggtatctacggcctggacttctatgtggtgctgggtaggccaggtttcagcatcgcagacaagaagcgcaggacaggctgcattggggccaaacacagaatcagcaaagaggaggccatgcgctggttccagcagaagtatgatgggatcatccttcctggcaaataaattcccgtttctatccaaaagagcaataaaaagttttcagtgaaatgtgcaaaaaaaaaaaa

SEQ ID NO: 24 - DNA, 1013 bp, Homo sapiens
  40S ribosomal protein S20 transcript variant 1, S20
  CDS (199)...(627): RPS20
atatttcctgttccggggcgtgtgggacccggatgcaagcgtgctatataagcgttgctcaagtcccacccctttctttttgaggaagacgcggtcgtaagggctgaggatttttggtccgcacgctcctgctcctgactcaccgctgttcgctctcgccgaggaacaagtcggtcaggaagcccgcgcgcaacagccatggcttttaaggataccggaaaaacacccgtggagccggaggtggcaattcaccgaattcgaatcaccctaacaagccgcaacgtaaaatccttggaaaaggtgtgtgctgacttgataagaggcgcaaaagaaaagaatctcaaagtgaaaggaccagttcgaatgcctaccaagactttgagaatcactacaagaaaaactccttgtggtgaaggttctaagacgtgggatcgtttccagatgagaattcacaagcgactcattgacttgcacagtccttctgagattgttaagcagattacttccatcagtattgagccaggagttgagttgatcgaatctacagatgcagaacccatggatacagagggccagcagtacactttgagaagtgtattcgaatccccggggacatgtcctttttaactgcattctcctccgccaaaaaagtgaccaagcagagtctttctctgtcacccaggctggagtgcaatggcgtgatctcagctcactgcaacctctgcctcctgggttcaagtgattctcgtgtctcagcctcctgagtagctgagactacaggtgtgcaccagtgttcccagctgatttttgtattttatgtagagatggggttatgccattttggccaggctagtctcgaactcctgagctcaggtgatacacacacctcagcaaatcttttaaattatacattctgtgatatttccttgactttcttatccagcacttgtattgattatttttcattttgataatgttgggtttttaaaaactcctttatgatggaaaatttc

SEQ ID NO: 25 - DNA, 890 bp, Homo sapiens
  60S ribosomal protein L7a, L7A, surfeit locus protein 3, surfeit 3 (SURF3), thyroid hormone receptor uncoupling protein (TRUP), PLA-X polypeptide
  CDS (31)...(831): RPL7A
tttcctttctctctcctcccgccgcccaagatgccgaaaggaaagaaggccaagggaaagaaggtggctccggccccagctgtcgtgaagaagcaggaggctaagaaagtggtgaatcccctgtttgagaaaaggcctaagaattttggcattggacaggacatccagcccaaaagagacctcacccgctttgtgaaatggccccgctatatcaggttgcagcggcagagagccatcctctataagcggctgaaagtgcctcctgcgattaaccagttcacccaggccctggaccgccaaacagctactcagctgcttaagctggcccacaagtacagaccagagacaaagcaagagaagaagcagagactgttggcccgggccgagaagaaggctgctggcaaaggggacgtcccaacgaagagaccacctgtccttcgagcaggagttaacaccgtcaccaccttggtggagaacaagaaagctcagctggtggtgattgcacacgacgtggatcccatcgagctggttgtcttcttgcctgccctgtgtcgtaaaatgggggtcccttactgcattatcaagggaaaggcaagactgggacgtctagtccacaggaagacctgcaccactgtcgccttcacacaggtgaactcggaagacaaaggcgctttggctaagctggtggaagctatcaggaccaattacaatgacagatacgatgagatccgccgtcactggggtggcaatgtcctgggtcctaagtctgtggctcgtatcgccaagctcgaaaaggcaaaggctaaagaacttgccactaaactgggttaaatgtacactgttgagttttctgtacataaaaataattgaaataatacaaattttccttc

SEQ ID NO: 26 - DNA, 872 bp, Homo sapiens
  40S ribosomal protein S19, S19, Diamond-Blackfan anemia (DBA, DBA1)
  CDS (373)...(810): RPS19
gtactttcgccatcatagtattctccaccactgttccttccagccacgaacgacgcaaacgaagccaagttcccccagctccgaacaggagctctctatcctctctctattacactccgggagaaggaaacgcgggaggaaacccaggcctccacgcgcgaccccttggccctcccctttacctctccacccctcactagacaccctcccctctaggcggggacgaactttcgccctgagagaggcggagcctcagcgtctaccctcgctctcgcgagctttcggaactctcgcgagaccctacgcccgacttgtgcgcccgggaaaccccgtcgttccctttcccctggctggcagcgcggaggccgcacgatgcctggagttactgtaaaagacgtgaaccagcaggagttcgtcagagctctggcagccttcctcaaaaagtccgggaagctgaaagtccccgaatgggtggataccgtcaagctggccaagcacaaagagcttgctccctacgatgagaactggttctacacgcgagctgcttccacagcgcggcacctgtacctccggggtggcgctggggttggctccatgaccaagatctatgggggacgtcagagaaacggcgtcatgcccagccacttcagccgaggctccaagagtgtggcccgccgggtcctccaagccctggaggggctgaaaatggtggaaaaggaccaagatggcggccgcaaactgacacctcagggacaaagagatctggacagaatcgccggacaggtggcagctgccaacaagaagcattagaacaaaccatgctgggttaataaattgcctcattcgtaaaaaaaaaaaaaaaaaaaaaaaaa

SEQ ID NO: 27 - DNA, 418 bp, Homo sapiens
  40S ribosomal protein S21, S21, 8.2 kDa differentiation factor
  CDS (91)...(342): RPS21
cttgcccgccgatatctctgccgggtgactagctgcttcctttctctctcgcgcgcggtgtggtggcagcaggcgcagcccagcctcgaaatgcagaacgacgccggcgagttcgtggacctgtacgtgccgcggaaatgctccgctagcaatcgcatcatcggtgccaaggaccacgcatccatccagatgaacgtggccgaggttgacaaggtcacaggcaggtttaatggccagtttaaaacttatgctatctgcggggccattcgtaggatgggtgagtcagatgattccattctccgattggccaaggccgatggcatcgtctcaaagaacttttgactggagagaatcacagatgtggaatatttgtcataaataaataatgaaaacctaaaaaaaaaaaaaaaaaaaaaaa

SEQ ID NO: 28 - DNA, 1289 bp, Homo sapiens
  60S acidic ribosomal protein P0, LP0, P0, ribosomal protein L10E, L10E, acidic ribosomal phosphoprotein P0, PRLP0, RPP0
  CDS (238)...(1191): RPLP0
gtctgacgggcgatggcgcagccaatagacaggagcgctatccgcggtttctgattggctactttgttcgcattataaaaggcacgcgcgggcgcgaggcccttctctcgccaggcgtcctcgtggaaggcccgggaccgcgggatgggtgtcggcgtgaccaggcctgagctccctgtctctcctcagtgacatcgtctttaaaccctgcgtggcaatccctgacgcaccgccgtgatgcccagggaagacagggcgacctggaagtccaactacttccttaagatcatccaactattggatgattatccgaaatgtttcattgtgggagcagacaatgtgggctccaagcagatgcagcagatccgcatgtcccttcgcgggaaggctgtggtgctgatgggcaagaacaccatgatgcgcaaggccatccgagggcacctggaaaacaacccagctctggagaaactgctgcctcatatccgggggaatgtgggctttgtgttcaccaaggaggacctcactgagatcagggacatgttgctggccaataaggtgccagctgctgcccgtgctggtgccattgccccatgtgaagtcactgtgccagcccagaacactggtctcgggcccgagaagacctcctttttccaggctttaggtatcaccactaaaatctccaggggcaccattgaaatcctgagtgatgtgcagctgatcaagactggagacaaagtgggagccagcgaagccacgctgctgaacatgctcaacatctcccccttctcctttgggctggtcatccagcaggtgttcgacaatggcagcatctacaaccctgaagtgcttgatatcacagaggaaactctgcattctcgcttcctggagggtgtccgcaatgttgccagtgtctgtctgcagattggctacccaactgttgcatcagtaccccattctatcatcaacgggtacaaacgagtcctggccttgtctgtggagacggattacaccttcccacttgctgaaaaggtcaaggccttcttggctgatccatctgcctttgtggctgctgcccctgtggctgctgccaccacagctgctcctgctgctgctgcagccccagctaaggttgaagccaaggaagagtcggaggagtcggacgaggatatgggatttggtctctttgactaatcaccaaaaagcaaccaacttagccagttttatttgcaaaacaaggaaataaaggcttacttctttaaaaagtaaaaaaaaaaaaaaaaaaaaaaaaa

SEQ ID NO: 29 - DNA, 753 bp, Homo sapiens
  40S ribosomal protein S9, S9
  CDS (57)...(641): RPS9
ctctttctcagtgaccgggtggtttgcttaggcgcagacggggaagcggagccaacatgccagtggcccggagctgggtttgtcgcaaaacttatgtgaccccgcggagacccttcgagaaatctcgtctcgaccaagagctgaagctgatcggcgagtatgggctccggaacaaacgtgaggtctggagggtcaaatttaccctggccaagatccgcaaggccgcccgggaactgctgacgcttgatgagaaggacccacggcgtctgttcgaaggcaacgccctgctgcggcggctggtccgcattggggtgctggatgagggcaagatgaagctggattacatcctgggcctgaagatagaggatttcttagagagacgcctgcagacccaggtcttcaagctgggcttggccaagtccatccaccacgctcgcgtgctgatccgccagcgccatatcagggtccgcaagcaggtggtgaacatcccgtccttcattgtccgcctggattcccagaagcacatcgacttctctctgcgctctccctacgggggtggccgcccgggccgcgtgaagaggaagaatgccaagaagggccagggtggggctggggctggagacgacgaggaggaggattaagtccacctgtccctcctgggctgctggattgtctcgttttcctgccaaataaacaggatcagcgctttacaaaaaaaaaaaaaaaaaaaaaaaaaaaaaaaaaaaaaaaaaa

SEQ ID NO: 30 - DNA, 2108 bp, Homo sapiens
  40S ribosomal protein S3 transcript variant 1, S3, IMR-90 ribosomal protein S3
  CDS (58)...(789): RPS3
atactcacttccgcccgcgagccacttcctttcctttcagcggagcgcggcggcaagatggcagtgcaaatatccaagaagaggaagtttgtcgctgatggcatcttcaaagctgaactgaatgagtttcttactcgggagctggctgaagatggctactctggagttgaggtgcgagttacaccaaccaggacagaaatcattatcttagccaccagaacacagaatgttcttggtgagaagggccggcggattcgggaactgactgctgtagttcagaagaggtttggctttccagagggcagtgtagagctttatgctgaaaaggtggccactagaggtctgtgtgccattgcccaggcagagtctctgcgttacaaactcctaggagggcttgctgtgcggagggcctgctatggtgtgctgcggttcatcatggagagtggggccaaaggctgcgaggttgtggtgtctgggaaactccgaggacagagggctaaatccatgaagtttgtggatggcctgatgatccacagcggagaccctgttaactactacgttgacactgctgtgcgccacgtgttgctcagacagggtgtgctgggcatcaaggtgaagatcatgctgccctgggacccaactggtaagattggccctaagaagcccctgcctgaccacgtgagcattgtggaacccaaagatgagatactgcccaccacccccatctcagaacagaagggtgggaagccagagccgcctgccatgccccagccagtccccacagcataacagggtctccttggcagctgtattctggagtctggatgttgctctctaaagacctttaataaaattttgtacaaagacacaaggtctgactagactgttcagtattcagactgaggggcatgttggcctctggagcattacatatcttcttggttttaaccatacttgtggtatttgcaagggccagaacagtaagacccaagcagagccaaccagagaaataatatttgtgtgatagagaaggctgatagcaagcaaggcagcaccttgattcgttgtcctgtagttcaggattgtaggtttagaagagggatatgtttgagtttttcctatgcataaggcgatccacgttgcacatagaaagtgaatataaatggccattatattttgtgtcatgctgtgctctaagtgttctttacatatgtactcgttaatcaacctctctaaagtgtaaaggaaatttgcttgcaccactgaaggcacataaggctcagaagtaaatttgcctaagcagtataaagctatcattagaatccacattcctaagttgtgttctcttaggggatcatggaaccagtcattggtactacaggctattatgttctggagaactgtgaagaacatttaaattgtctctgattttatctatcaatgttttgaagtattttctaccagtgtctgtacttcacaagaaattcggcactattttttcaggcaaaactagtgagggacaggttggcttgaaaatcatgagactgttgttaaatcagatgctggttgatcacagaggggacttccagggaaagctgttatcaggtggctgcttcctggtgatgcagcctggctgatgagataaccctggctccacagatggcttagcaggtgctgtgatgatttggttttcttctcaattagactgagctgcacatggtgtttatattgcttggcacatggtaagggcttaatatttgaggtaattatgtagggcgtacactgacaagtatctgacccccccttcctttttgactcataaattggtcatcttaaccatttaagtgtacacttctatagtgacagagttagccctctgtccaagggatttgcatctgtggattcaaccaactttgggtcaaaaataatcaaaaaggatggttgtgtgtgtattgaacatgtagacttatttttcttattttcaaaatactatattttcttgtcacttattttcttgtacactgcagttgtaacagctatgtagcatgtacattaggtattaaaagtaatccagtgaagattgaaagtctaaaaaaaaaaaaaaaaaa

SEQ ID NO: 31 - DNA, 6668 bp, Homo sapiens
  cartilage associated protein precursor (CRTAP, CASP), leprecan-like 3 (LEPREL3), OI7
  CDS (121)...(1326): CRTAP
aggctggcgtccccgccccgaaagcactgggcccgccgcgtcgcaccgtcctctttcctttccttctccctccccttttcccttccttcgtcccttccttccttcctttcgccgggcgcgatggagccggggcgccggggggccgcggcgctgctagcgctgctgtgcgtggcctgcgcgctgcgcgccgggcgcgcccaatacgaacgctacagcttccgcagcttcccacgggacgagctgatgccgctcgagtcggcctaccggcacgcgctggacaagtacagcggcgagcactgggccgagagcgtgggctacctggagatcagcctgcggctgcaccgcttgctgcgcgacagcgaggccttctgccaccgcaactgcagcgccgcgccgcagcccgagcccgccgccggcctcgccagctatcccgagctgcgcctcttcgggggcctgctgcgccgcgcgcactgcctcaagcgctgcaagcagggcctgccagccttccgccagtcccagcccagccgcgaggtgctggcggacttccagcgccgcgagccctacaagttcctgcagttcgcttacttcaaggcaaataatctccccaaagccatcgccgctgctcacacctttctactgaagcatcctgatgacgaaatgatgaagaggaacatggcatattataagagcctgcctggtgccgaggactacattaaagacctggaaaccaagtcatatgaaagcctgttcatccgagcagtgcgggcatacaacggtgagaactggagaacatccatcacagacatggagctggcccttcccgacttcttcaaagccttttacgagtgtctcgcagcctgcgagggttccagggagatcaaggacttcaaggatttctacctttccatagcagatcattatgtagaagttctggaatgcaaaatacagtgtgaagagaacctcaccccagttataggaggctatccggttgagaaatttgtggctaccatgtatcattacttgcagtttgcctattataagttgaacgacctgaagaatgcagccccctgtgcagtcagctatctgctctttgatcagaatgacaaggtcatgcagcagaacctggtgtattaccagtaccacagggacacttggggcctctcggatgagcacttccagcccagacctgaagcagttcagttctttaatgtgaccacactccagaaggagctgtatgactttgctaaggaaaatataatggatgatgatgagggagaagttgtggaatatgtggatgacctcttggaactggaggagaccagctagcccacagcaaccaaagagacttcctcttggcgttcaggaaacacagattctttgtccttttcccaacagcccaggctgttgatacctcagagccttctctttactctccaaagtgaaagggaagcccccgtctctctaactgcatgtcatcaggggtgagcctgcctttcctatcttcacacctgccacctcatgttcacacctatctttctcaccttttttttgagatggagtctcgctctcttgcccaggctggagtgcaatggcacgttctcagctcactgcaacctccgcctcttgggttcaagcaattctgctgcatcagcctcccgagtacctgggattacaggcatgtgccaccacgcccggctaattttgtatttttagtagagacggggttttgccatgttggccaggctggtctcgaactcttgacttcagatgatccatctgccttggcctcccacagtgctgggattacaggcgtgagccaccatgcccggcctctttctcacctttacacctgtcttcttatcctcacatctgttttcacaccttcatccctgtcttcctcatgttcacacttgtcttccccatgttcatagctgcctttcttaccattttggtttgaagggcagtcttctctggcttgtttttttgtttttcccagaaaatcagtattattttttaaataagaaaaacattcctagaagatgataattgtgaaaacctcctttggcttatttgcttttccagattttagtctcctttctccccatccgggaaagatggtggaagacataggctaaatttctccagcctcacaatggtcttcacttggtctgacttgtaccaattctagcacccactgaaaaacaagttgagtagagagtgtagagtgcagaaatgtggcttttgccccactttgcatctccaaaattacaacggttggccgatcccatttgaggacaatgcttagttataagtctccgagttggaaaaggaagaaagccagagctgtctagtttcattcattctttcagtaaatatttattgagtacctactgtgtgctaggcattgacctgggaactagagatacttcacagaataacagggaaagttccctgtgctcatggagcttacattctacagggagaaagagatagccaatacataggaataaatatatacaaggtatcatgtagtgataattgctgtggagaaaaataaagcaggggagggagtaagaaatcctggagatgaggctgcagttttaaatggggcctcactgggaatgtgacgttgagcagagacgttagggaagtggatcctggacaaggcattccaggcagaggaacaggatgtgcactgccccaaagtgagaacttgctctacgtggtcaggaaagagcagggagaccaagcagagtcgtgggcaggggtagaatggaaggagaggcggctggggaggacaggtggtggagggccttggcttctgctaagtgagatgggaaccactggagggtttgaacagaggagtgccttgattgatttatattttgcaagggtcattctagctgccatattgtgaaaaactttagtggacaagggcagaaggaagagggaagacctgttaggaagctactgcaaggttccaggcttgggcctgggccacagcaacagcagtggtcaaatatctagatttattttgaaaagagccaataggatttgctgagagtttgaatgtggagtgtaagagaaggaagagttaatgatgacattaaggtttttggcctgaatagcaggaaagatggagttaccagttactgaaatagggaaggatgggctgggtaagtatggaatttggtgcaaagcaggctgtctgtggttggaatgggaggttctggctgcaaatcaaagtggagagttctctcaggtcaggtctgcagcagagctcgagacagggatctgaatgcacttggtttattgttgggggtgctctcagaaggaacctgtgaaagcctttatcagtcatttattggctgtgagaagttctctgggagtgtgggtacatttgaaggcaagtgacttcagttgagggcaagtctctggaaaagaggctgtaggcatctggcagctaccatgcatggtagtgtgttgggggtgggggtcctgggcactggctgtgtgaagggatctggcagggcaccacagcgccccctactgaaccatcagcatgtcagtggcatttaaagccatgcagctggaggggccactgagattgtctctgagtattactgagaagcaacagaaaagagccatggatggagcccttgggctctctgggaaatgggaaatcagccaaaggactgagaaggagttaccttaaggtcagagaaaaccaagagagtgtggtgttctggaagctgagctttctttattcaacctcattcccttctccaaataagccacttgtgtagttgggcccctccagggttgaaggcaagaggagaaaggcacagcgtttgggaaacaagacttttcctgcaatagcctgggaaggaataaaaggatagagtgtttgggtttttgtgtaatggtggttaattggggtggaacactcacacgttgtgctttttctgggcttcccttatcccccagaacactctaccaacctcggggaactcgggcacatccttctgtttctccttcagctctatcctgctttcctcatcccttctgacaccacgtcctcactcacctgcacaagaatccctgcatcaggttctcctttgagggtacccacccaggacagtcccctaccacttctgtcttgggctgaagttgcccacgtccacaaaatctgtactcccagcgggggtgtttggcccgaggagtcagtgttattactggtggatgcaccgtgtccacagcagcccccaatcccagcgatgcgtcagatcttacgtggcttcctgctgggggagatggccttcacccacgggatgccgggttctcctttctttcctcaccccaacctttactccaccagagaaacttccttttgaactcagtggggaagagggtgatgagacaggactagaaagtagtgggggacccagcgagtggacgccctgctccgggattcctgagtctgtaaatagtgtgcccagcagctgtgaactccccttatagcctcaggctgcagtgtccttcccagctgtgtgagaaaatgaaagccgacgtccacagggacccaggcagggttgggtgttgtgactcactccacctctgtgccctgcagaggtactgttgggtccttgtcttgtgagcctggggtgagctctctgtacatgttgttgttccacgtatgggttgacttggcatgctggggggtcctcgttcactctctgaagttggcctcctttcactggggattgaaaagcacctccacccctaccctagtgatgtcccctgaggacccgggtgatagtacagtcaatattgtcagtactttgctttgattgaaggctgtagagctgagttaccaaaatttctatttcaaaggaaaccaaaccttaaaaaaaaaaaacaaaaactgggctgggtcttccaaacctaccatgaaaccctggtgtgcaggctgcactcaatgacctcaacccaacacctccctgagtgtgcttcttggaagagcctagaagattcctggatggagaccccattggttcagcctcaagtctggcccgtcttcgaaaaaacaaacacatttgtaagctttgtgggagcttccaggcctgctctaagatgccttgcttgtcctttgacccatcagcatggagctcagtggttgctgtttggttctgcaggctggtggggaggccgcccatcgtggtggggcatctgtccagccccattgccactcagggcatccaaacaggaggcacccgctgggaagggtctaaagatactccttgtggccactgctactgttcacacttgacttgtggagaagcgaagggctgaggggaggtttgtgtacacccatgtatttaaaagtgactgactgactgaaatgagcacataccgacatatgcaacatactaataccttcctgattttcgagactttctaattactacaactaacctgttgtgctcacctctggaattcagaaagagagccactgcgagcactgaccacaagggctgccttaggaaggaaatgtgtgctttcaggagttcttattaggggaattttaagagcacaaaaattttattgaacccaccttagtgacaaacagaaaatgatttgttagattgtcagttggaaggggtttattatgactgctggtgaaataaacagtgaccagtttctgccaacatttatggaaataacgtttctaggttttaaatgtgagccgtaaactgaagctacttcagttaaaaaaaaaaaaatcaatacttaaactgtagggaaaaggtggattggtgccagagaaaacattatttaatagtgtcagaacatggaactgcaacacagtttgtagcaaggcactgagaaaaacccacaactaatccttcatcgcagctgtctgaactcttgatcatctgccatcccccaaacagtgacttctttttttctggtgactccaggcctgaatgacctagtgtggagagtttaaactatgtacaagggaggaaagaaaaaaaggaaaggaaccttaagtaagcctcagccaaaggttttatgcattggacttcctgtgcctgcccccaggggcaagactgatccccatgcctgtgcccatgacatctccctgaaagaggacaccatgacagcccggctttgccttgactgacccactgctaccccagaaataagaatcaagagcagctattgttatccttagagtgttttccgtctagggccggctcgtgaacagccacatatccttgcacctgacactgtccccacacaaatagctggctttcgttgcttgttgaatgaatgagtgagttggctctatatccccttggagctggccggtaagatattagtgcctcattttacaagaagagaataggaaggaattaagcaatttggccaacagatacaagatagattccagagttttatctcccactttagggtggcagccagtaggccaaactccaaagaccgttgctgatgtctttttctgcctcccctctttgggttagtgtggtatgtacaagctcactcttgttgaaaattagaaaatagttgaaaacaaaaggtttttgtttttctttttaaatcacattaaatgttttacattgcttaaaaaaaaaaaaaaaaaa

SEQ ID NO: 32 - DNA, 967 bp, Homo sapiens
  hypothetical protein LOC80097, family with sequence similarity 128, member B (FAM128B), mitotic-spindle organizing protein 2B (MZT2B), mitotic-spindle organizing protein associated with a ring of gamma-tubulin 2B (MOZART2B)
  CDS (356)...(832): FAM128B
tttcttgaaagaggcatttaccgagcgcccaatgtatgcctggcactgggctgggtgctgccacctaagcgagcacgaccaatgcagtctatcagggaggcccagatcgccaagcagcggacccctgcggtccgccatgccactcccggctcctagagcgccgctcagcacaccgtgagcgcccaataactgttgggcttcaatgacgccgcggaggcggccccgtccccgcgctcccgcccctcccgccagggcagcccgggaggccagacgttgacgctgcagggagagggtggtgggcgcagccgctagggggcgcggcggggcggagcgcacctttccgcgggccgcggggatggcggcgcagggcgtagggcctgggccggggtcggcggcgcccccggggctggaggcggcccggcagaagctggcgctgcggcggaagaaggtgctgagcaccgaggagatggagctgtacgagctggcgcaggcggcgggcggcgctatcgaccccgacgtgttcaagatcctggtggacctgctgaagctgaacgtggcccccctcgccgtcttccagatgctcaagtccatgtgtgccgggcagaggctagcgagcgagccccaggaccctgcggccgtgtctctgcccacgtcgagcgtgcccgagacccgagggagaaacaaaggcagcgctgccctcgggggagcattggccctggcggaacgcagcagccgcgaaggatccagccagaggatgccacgccagcccagcgctaccaggctgcccaaggggggcgggcctgggaagagccctacacggggcagcacctaggatggggcagagacttgttgcatctttgtccccagcaaaggctacatgttacctccttcaattgataataaacctttctgagatgcagagggtccaggtcaaaaaaaaaaaaaaaaaaaaaaaaaaaaaaaaaaa

SEQ ID NO: 33 - DNA, 1787 bp, Homo sapiens
  60S ribosomal protein L32 transcript variant 3, L32, PP9932
  CDS (214)...(621): RPL32
gacctcctgggatcgcatctggagagtgcctagtattctgccagcttcggaaagggagggaaagcaagcctggcagaggcacccattccattcccagcttgctccgtagctggcgattggaagacactctgcgacagtgttcagtccctgggcaggaaagcctccttccaggattcttcctcacctggggccgcttcttccccaaaaggcatcatggccgccctcagaccccttgtgaagcccaagatcgtcaaaaagagaaccaagaagttcatccggcaccagtcagaccgatatgtcaaaattaagcgtaactggcggaaacccagaggcattgacaacagggttcgtagaagattcaagggccagatcttgatgcccaacattggttatggaagcaacaaaaaaacaaagcacatgctgcccagtggcttccggaagttcctggtccacaacgtcaaggagctggaagtgctgctgatgtgcaacaaatcttactgtgccgagatcgctcacaatgtttcctccaagaaccgcaaagccatcgtggaaagagctgcccaactggccatcagagtcaccaaccccaatgccaggctgcgcagtgaagaaaatgagtaggcagctcatgtgcacgttttctgtttaaataaatgtaaaaactgccatctggcatcttccttccttgattttaagtcttcagcttcttggccaacttagtttgccacagagattgttcttttgcttaagcccctttggaatctcccatttggaggggatttgtaaaggacactcagtccttgaacaggggaatgtggcctcaagtgcacagactagccttagtcatctccagttgaggctgggtatgaggggtacagacttggccctcacaccaggtaggttctgagacacttgaagaagcttgtggctcccaagccacaagtagtcattcttagccttgcttttgtaaagttaggtgacaagttattccatgtgatgcttgtgagaattgagaaaatatgcatggaaatatccagatgaatttcttacacagattcttacgggatgcctaaattgcatcctgtaacttctgtccaaaaagaacaggatgatgtacaaattgctcttccaggtaatccaccacggttaactggaaaagcactttcagtctcctataaccctcccaccagctgctgcttcaggtataatgttacagcagtttgccaaggcggggacctaactggtgacaattgagcctcttgactggtactcagaatttagtgacacgtggtcctgattttttttggagacggggtcttgctctcacccaggctgggagtgcagtggcacactgactacagccttgacctccccaggctcaggtgatcttcccacctcagccttccaagtagctgggactacagatgcacacctccaaacctgggtagtttttgaagtttttttgtagaggtggtctagccatgttgcctaggctcccgaactcctgagctcaagcaatcctgcttcagcctcccaaagtactgggattacaggcatcttctgtagtatataggtcatgagggatatgggatgtggtacttatgagacagaaatgcttacaggatgtttttctgtaaccatcctggtcaacttagcagaaatgctgcgctgggtataataaagcttttctacttctagtctagacaggaatcttacagattgtctcctgttcaaaacctagtcataaatatttataatgcaaactggtcaaaaaaaaaaaaaaaaaa

SEQ ID NO: 34 - DNA, 1552 bp, Homo sapiens
  eukaryotic translation elongation factor 1 gamma (EEF1G, EF1G, EF-1-gamma; eEF-1B gamma), translation elongation factor eEF-1 gamma chain, pancreatic tumor-related protein, GIG35, PRO1608
  CDS (147)...(1460): EEF1G
aactgtcgtacgtatgtcttctgtttcgtcctcgctttccggctgctgtttctccacggctctcctctttccccctcccttctctcccgggcggcttactttgcggcagcgccgagaaccccaccccctttctttgcggaatcaccatggcggctgggaccctgtacacgtatcctgaaaactggagggccttcaaggctctcatcgctgctcagtacagcggggctcaggtccgcgtgctctccgcaccaccccacttccattttggccaaaccaaccgcacccctgaatttctccgcaaatttcctgccggcaaggtcccagcatttgagggtgatgatggattctgtgtgtttgagagcaacgccattgcctactatgtgagcaatgaggagctgcggggaagtactccagaggcagcagcccaggtggtgcagtgggtgagctttgctgattccgatatagtgcccccagccagtacctgggtgttccccaccttgggcatcatgcaccacaacaaacaggccactgagaatgcaaaggaggaagtgaggcgaattctggggctgctggatgcttacttgaagacgaggacttttctggtgggcgaacgagtgacattggctgacatcacagttgtctgcaccctgttgtggctctataagcaggttctagagccttctttccgccaggcctttcccaataccaaccgctggttcctcacctgcattaaccagccccagttccgggctgtcttgggcgaagtgaaactgtgtgagaagatggcccagtttgatgctaaaaagtttgcagagacccaacctaaaaaggacacaccacggaaagagaagggttcacgggaagagaagcagaagccccaggctgagcggaaggaggagaaaaaggcggctgcccctgctcctgaggaggagatggatgaatgtgagcaggcgctggctgctgagcccaaggccaaggaccccttcgctcacctgcccaagagtacctttgtgttggatgaatttaagcgcaagtactccaatgaggacacactctctgtggcactgccatatttctgggagcactttgataaggacggctggtccctgtggtactcagagtatcgcttccctgaagaactcactcagaccttcatgagctgcaatctcatcactggaatgttccagcgactggacaagctgaggaagaatgccttcgccagtgtcatcctttttggaaccaacaatagcagctccatttctggagtctgggtcttccgaggccaggagcttgcctttccgctgagtccagattggcaggtggactacgagtcatacacatggcggaaactggatcctggcagcgaggagacccagacgctggttcgagagtacttttcctgggagggggccttccagcatgtgggcaaagccttcaatcagggcaagatcttcaagtgaacatctcttgccatcacctagctgcctgcacctgcccttcagggagatgggggtcattaaaggaaactgaacattgaaaaaaaaaaaaaaaa

SEQ ID NO: 35 - DNA, 1978 bp, Homo sapiens
  60S ribosomal protein L22-like 1
  CDS (90)...(458): RPL22L1
cgctctcagcgcgtgacgcagcacgctttgatataaatgcagaccgcgcggccgtagcttcctctctgctctcgcggccgactcgcaagatggcgccgcagaaagacaggaagcccaagaggtcaacctggaggtttaatttggaccttactcatccagtagaagatggaatttttgattctggaaattttgagcaatttctacgggagaaggttaaagtcaatggcaaaactggaaatctcgggaatgttgttcacattgaacgcttcaagaataaaatcacagttgtttctgagaaacagttctctaaaaggtatttgaaataccttaccaagaaataccttaagaagaacaatcttcgtgattggcttcgagtggttgcatctgacaaggagacctacgaacttcgttacttccagattagtcaagatgaagatgaatcagagtcggaggactaggcaaaggctccccttacagggctttgcttattaataaaataaatgaagtatacatgagaaataccaagaaattggcttttagtttatcagtgaataaaaaatattatactcttgaacttttgtctcatttttttgagtatgctgtttatatgattttgatttccctctgataactatcaacagtatttaaatagcttatagctggtataattttttcccacgatttccaaaatcttttatgtactcaggtaaaagtagcgttatataggaaatcttttttttagacactctcgttctgtcacccaggctggagtgcagtgactcagcttcctaaatagctggaattacaggtgtgagccaccatgcccggctaattttttgtacttttagtagagtagggtttggccatgttggccaggctggtttcaaactcctgacctcaagtgatctacccacctcggcttcccaaagtgctgattatagctgtgaaccaccatgcccggccaggaaatcttactgtagaacaattttttatatagctgtataaaatgtatatgattgtcttgacagtctcaaatactgtttttaatagcttgtaaatgtaatctcaagtgcttagaacagttcttacatataagttgctctgtagtttgctcttatagttagcccaaagactctgggtgtgaggcctgctgtaaaccaatgttaaactgcttattagaaagccctaaccacctgctttgtaggcaccagaaactcaaaaccaaatctcaactcagctacagaatctactgtggtccttgtctgaaaaaattagttcactcggttggaatcttgtctcagagcatcctcatctctttctcaaaagcccctaccccaacaccggcgtgttggttgtctattgaaacttacaagtggatggaccctttctcccgaataaactggcctttgaaagctctaatcgaaatggtttggcaaaatccatactgcaggagattagggaggacaagaatgatgtgcctttttgtactgctgagcctgatggtggtgccactacttcaggtacttagatgagtcttgatgctaatagaattgtgtcgccaaacatatctggacagttacaacctaatctatgcattaattggtttgggaattgcttgaaattattgtttaattcaatgttttaattcgttttcctaaaaatttaagtgcccccatcatcgtgcaatacctcagtgcagcaactccttgattcttggatgactgaacttcctaacttggctctgccccattgttcccatttttcatgtttttcacaaatagttaaccaggtacctactactgtgcaccgctgcagagcattgaggatgtatgtgatgagtaaaaacacccagcctgctctgctgtgttagtattatgacggaaactgatcaaatcacatgtgaacaaatttactgctacaaaagggagggcttaataaaaggaatttcatctgggaaggcaaaaaaaaaaaaaaaaaa

SEQ ID NO: 36 - DNA, 1561 bp, Homo sapiens
  Y box binding protein 1 (YB1, YB-1, YBX1), nuclease sensitive element binding protein 1 (NSEP1, NSEP-1), DNA-binding protein B (DBPB), CCAAT-binding transcription factor I subunit A (CBF-A), enhancer factor I subunit A (EFI-A), BP-8, CSDA2, CSDB, MDR-NF1
  CDS (172)...(1146): YB1
gggcttatcccgcctgtcccgccattctcgctagttcgatcggtagcgggagcggagagcggaccccagagagccctgagcagccccaccgccgccgccggcctagttaccatcacaccccgggaggagccgcagctgccgcagccggccccagtcaccatcaccgcaaccatgagcagcgaggccgagacccagcagccgcccgccgccccccccgccgcccccgccctcagcgccgccgacaccaagcccggcactacgggcagcggcgcagggagcggtggcccgggcggcctcacatcggcggcgcctgccggcggggacaagaaggtcatcgcaacgaaggttttgggaacagtaaaatggttcaatgtaaggaacggatatggtttcatcaacaggaatgacaccaaggaagatgtatttgtacaccagactgccataaagaagaataaccccaggaagtaccttcgcagtgtaggagatggagagactgtggagtttgatgttgttgaaggagaaaagggtgcggaggcagcaaatgttacaggtcctggtggtgttccagttcaaggcagtaaatatgcagcagaccgtaaccattatagacgctatccacgtcgtaggggtcctccacgcaattaccagcaaaattaccagaatagtgagagtggggaaaagaacgagggatcggagagtgctcccgaaggccaggcccaacaacgccggccctaccgcaggcgaaggttcccaccttactacatgcggagaccctatgggcgtcgaccacagtattccaaccctcctgtgcagggagaagtgatggagggtgctgacaaccagggtgcaggagaacaaggtagaccagtgaggcagaatatgtatcggggatatagaccacgattccgcaggggccctcctcgccaaagacagcctagagaggacggcaatgaagaagataaagaaaatcaaggagatgagacccaaggtcagcagccacctcaacgtcggtaccgccgcaacttcaattaccgacgcagacgcccagaaaaccctaaaccacaagatggcaaagagacaaaagcagccgatccaccagctgagaattcgtccgctcccgaggctgagcagggcggggctgagtaaatgccggcttaccatctctaccatcatccggtttagtcatccaacaagaagaaatatgaaattccagcaataagaaatgaacaaaagattggagctgaagacctaaagtgcttgctttttgcccgttgaccagataaatagaactatctgcattatctatgcagcatggggtttttattatttttacctaaagacgtctctttttggtaataacaaacgtgttttttaaaaaagcctggtttttctcaatacgcctttaaaggtttttaaattgtttcatatctggtcaagttgagatttttaagaacttcatttttaatttgtaataaaagtttacaacttgattttttcaaaaaagtcaacaaactgcaagcacctgttaataaaggtcttaaataataaaaaaaaaaaaaaa

SEQ ID NO: 37 - DNA, 4041 bp, Homo sapiens
  eukaryotic translation initiation factor 4B (EIF4B, EIF-4B), PRO1843
  CDS (207)...(2042): EIF4B
ggccacatgtcgcgcatgtcttcccgtcggacggcgtgccacctcgccgcgcagctttacgaacctagagcagcgccgccccgcctcctgtctccgtcctcacctccccgccccctcccagcttcgcgtctcctagctcgacgcgcccgctataatcacgtgattgcctcatccgggtcttttgcgttctctttccctctcccaacatggcggcctcagcaaaaaagaagaataagaaggggaagactatctccctaacagactttctggctgaggatgggggtactggtggaggaagcacctatgtttccaaaccagtcagctgggctgatgaaacggatgacctggaaggagatgtttcgaccacttggcacagtaacgatgacgatgtgtatagggcgcctccaattgaccgttccatccttcccactgctccacgggctgctcgggaacccaatatcgaccggagccgtcttcccaaatcgccaccctacactgcttttctaggaaacctaccctatgatgttacagaagagtcaattaaggaattctttcgaggattaaatatcagtgcagtgcgtttaccacgtgaacccagcaatccagagaggttgaaaggttttggttatgctgaatttgaggacctggattccctgctcagtgccctgagtctcaatgaagagtctctaggtaacaggagaattcgagtggacgttgctgatcaagcacaggataaagacagggatgatcgttcttttggccgtgatagaaatcgggattctgacaaaacagatacagactggagggctcgtcctgctacagacagctttgatgactacccacctagaagaggtgatgatagctttggagacaagtatcgagatcgttatgattcagaccggtatcgggatgggtatcgggatgggtatcgggatggcccacgccgggatatggatcgatatggtggccgggatcgctatgatgaccgaggcagcagagactatgatagaggctatgattcccggataggcagtggcagaagagcatttggcagtgggtatcgcagggatgatgactacagaggaggcggggaccgctatgaagaccgatatgacagacgggatgatcggtcgtggagctccagagatgattactctcgggatgattataggcgtgatgatagaggtcccccccaaagacccaaactgaatctaaagcctcggagtactcctaaggaagatgattcctctgctagtacctcccagtccactcgagctgcttctatctttggaggggcaaagcctgttgacacagctgctagagaaagagaagtagaagaacggctacagaaggaacaagagaagttgcagcgtcagctggatgagccaaaactagaacgacggcctcgggagagacacccaagctggcgaagtgaagaaactcaggaacgggaacggtcgaggacaggaagtgagtcatcacaaactgggacctccaccacatctagcagaaatgcacgaaggagagagagtgagaagtctctagaaaatgaaacactcaataaggaggaagattgccactctccaacttctaaacctcccaaacctgatcagcccctaaaggtaatgccagcccctccaccaaaggagaatgcttgggtgaagcgaagttctaaccctcctgctcgatctcagagctcagacacagagcagcagtcccctacaagtggtgggggaaaagtagctccagctcaaccatctgaggaaggaccaggaaggaaagatgaaaataaagtagatgggatgaatgccccaaaaggccaaactgggaactctagccgtggtccaggagacggagggaacagagaccactggaaggagtcagataggaaagatggcaaaaaggatcaagactccagatctgcacctgagccaaagaaacctgaggaaaatccagcttccaagttcagttctgcaagcaagtatgctgctctctctgttgatggtgaagatgaaaatgagggagaagattatgccgaatagacctctacatcctgtgcttttctcctagtttctctccaccctggaacattcgagagcaaatcaaaacctctatccagacaagacaaaataaaactcaccatctcctgaagacctttcttacctttttttaaaaacaaaaaatgaaattattttgcatgctgctgcagcctttaaagtattgaagtaactggagaattgccaatacagccagagagaaagggactacagctttttagaggaaaagttgtggtgcgttatgtcaccatgcagttgccagtgtgattagtgcctaggggtctccatttagcagaaatggtaatgacagtgatataatgcctggaacctggttgggcagtaggggagggaggtagaaggaaaagtgtgagatttctaccttttagtttttatcctattgtggcatatatgaattctcaaacattatctgaataaattttccactcttggaaaggtagatttagcctcaagttgttctagtctccaggaggctgccagcccctcctcttatttaattctgagttttgggggccagcctagagggaattccttttttttttttaaccccccaggggggtagttgggagtgagactataggccataaagaatgggactgcattggaccaaaataaatgggaaaatcgtggtttgaaaagaagcttttgggaagtgatgagtcattttgcaccaggtaataggggaaaattgtgtgacctccagcaaacacatgaatggttatttcctggagccggaagcacttgggggtcgtggtaattcccagtgttttctgtgtcctagttttaccctttctaaacactgtcctttttgaaagttttgaatatatccacattctattgaaaccttgaaactaaaaatttagactcttatcatcatcttaagttcttcatgctactcttaacctcccaaaaagcagtatctaagtcacatacatgatgtcttgggcattttctcagccatggagaactctgaaaggaagaatcgctgcttttctcaagcaaatcggtttcttgatgtcttttggttctccttgcctgctcctgatgcttggaccccttttattgatcagagtgctctagaataatggatggtcttggatgatggataaatagggacagggacagttaaattgggagcctttcttacaaccttgatgggatttttccccccaagtttccttctccactgaaatgccacactaatgcttgttggattcatgaggtggccagaccaatgtgttgttttgttgttgtttttttaagcttcccttgagagaataaatggtaatggagagaactatttaacaaggtcctggtttctcttgcaacacagtagctaaacttgcctgcttttatatgcatttttgtagggatcagcttggtagacagtattagcggagaaacaccttgatcttggtttgcaagcccttctcccatcagtcctagattaggccctgttcagccatgcaggggtgttggtttatgcgtgctgcagcagtgggcataatgaatataatttacccagtggacaaaggtgtgtaccaagtgaatttaaataattggtgtggattggccagtagctaagaagtgggcttttaaagagtattgaagattgaaagggtttttctttcttttttaaaaaagaaaaacaaactattgattgtagataatgaaaagctagggtttgccctcttcatgtctactctccttccaaatagttatatccaaaactgtttttccctctcccctaccttgtcccccctattaaaatagaaacagggattgattaatgtcccgctcctgaatacatgtaaaatttgtacaaaaatatcttctatgaaaatgatttgtaatctgtagacttattacctgggagatgtcttgatgtaaaatcccatcctttgggttgtgggttttttgttttctccaaataaatctgatctttaaagttcaaaaaaaaaaaaaa

SEQ ID NO: 38 - DNA, 511 bp, Homo sapiens
  60S acidic ribosomal protein P2, LP2, P2, RPP2, D11S2243E, ribosomal protein, large, P2, acidic ribosomal phosphoprotein P2, renal carcinoma antigen NY-REN-44
  CDS (106)...(453): RPLP2
ggtttaaccccgcctcttgcgtcggcgccttccttttcctccctgtcgccaccgaggtcgcacgcgtgagacttctccgccgcctccgccgcagacgccgccgcgatgcgctacgtcgcctcctacctgctggctgccctagggggcaactcctcccccagcgccaaggacatcaagaagatcttggacagcgtgggtatcgaggcggacgacgaccggctcaacaaggttatcagtgagctgaatggaaaaaacattgaagacgtcattgcccagggtattggcaagcttgccagtgtacctgctggtggggctgtagccgtctctgctgccccaggctctgcagcccctgctgctggttctgcccctgctgcagcagaggagaagaaagatgagaagaaggaggagtctgaagagtcagatgatgacatgggatttggcctttttgattaaattcctgctcccctgcaaataaagcctttttacacatctcaaaaaaaaaaaaaaaaaa

SEQ ID NO: 39 - DNA, 603 bp, Homo sapiens
  40S ribosomal protein S16, S16
  CDS (84)...(524): RPS16
gaaaagcggccagggtggcccctagctttccttttccggttgcggcgccgcgcggtgaggttgtctagtccacgctcggagccatgccgtccaagggcccgctgcagtctgtgcaggtcttcggacgcaagaagacagcgacagctgtggcgcactgcaaacgcggcaatggtctcatcaaggtgaacgggcggcccctggagatgattgagccgcgcacgctacagtacaagctgctggagccagttctgcttctcggcaaggagcgatttgctggtgtagacatccgtgtccgtgtaaagggtggtggtcacgtggcccagatttatgctatccgtcagtccatctccaaagccctggtggcctattaccagaaatatgtggatgaggcttccaagaaggagatcaaagacatcctcatccagtatgaccggaccctgctggtagctgaccctcgtcgctgcgagtccaaaaagtttggaggccctggtgcccgcgctcgctaccagaaatcctaccgataagcccatcgtgactcaaaactcacttgtataataaacagtttttgagggattttaaagtttcaagaaaaaaaaaaaaaaa

SEQ ID NO: 40 - DNA, 2151 bp, Homo sapiens
  vimentin (VIM), epididymis luminal protein 113 (HEL113), CTRCT30
  CDS (414)...(1814): VIM
gcctctccaaaggctgcagaagtttcttgctaacaaaaagtccgcacattcgagcaaagacaggctttagcgagttattaaaaacttaggggcgctcttgtcccccacagggcccgaccgcacacagcaaggcgatggcccagctgtaagttggtagcactgagaactagcagcgcgcgcggagcccgctgagacttgaatcaatctggtctaacggtttcccctaaaccgctaggagccctcaatcggcgggacagcagggcgcgtcctctgccactctcgctccgaggtccccgcgccagagacgcagccgcgctcccaccacccacacccaccgcgccctcgttcgcctcttctccgggagccagtccgcgccaccgccgccgcccaggccatcgccaccctccgcagccatgtccaccaggtccgtgtcctcgtcctcctaccgcaggatgttcggcggcccgggcaccgcgagccggccgagctccagccggagctacgtgactacgtccacccgcacctacagcctgggcagcgcgctgcgccccagcaccagccgcagcctctacgcctcgtccccgggcggcgtgtatgccacgcgctcctctgccgtgcgcctgcggagcagcgtgcccggggtgcggctcctgcaggactcggtggacttctcgctggccgacgccatcaacaccgagttcaagaacacccgcaccaacgagaaggtggagctgcaggagctgaatgaccgcttcgccaactacatcgacaaggtgcgcttcctggagcagcagaataagatcctgctggccgagctcgagcagctcaagggccaaggcaagtcgcgcctgggggacctctacgaggaggagatgcgggagctgcgccggcaggtggaccagctaaccaacgacaaagcccgcgtcgaggtggagcgcgacaacctggccgaggacatcatgcgcctccgggagaaattgcaggaggagatgcttcagagagaggaagccgaaaacaccctgcaatctttcagacaggatgttgacaatgcgtctctggcacgtcttgaccttgaacgcaaagtggaatctttgcaagaagagattgcctttttgaagaaactccacgaagaggaaatccaggagctgcaggctcagattcaggaacagcatgtccaaatcgatgtggatgtttccaagcctgacctcacggctgccctgcgtgacgtacgtcagcaatatgaaagtgtggctgccaagaacctgcaggaggcagaagaatggtacaaatccaagtttgctgacctctctgaggctgccaaccggaacaatgacgccctgcgccaggcaaagcaggagtccactgagtaccggagacaggtgcagtccctcacctgtgaagtggatgcccttaaaggaaccaatgagtccctggaacgccagatgcgtgaaatggaagagaactttgccgttgaagctgctaactaccaagacactattggccgcctgcaggatgagattcagaatatgaaggaggaaatggctcgtcaccttcgtgaataccaagacctgctcaatgttaagatggcccttgacattgagattgccacctacaggaagctgctggaaggcgaggagagcaggatttctctgcctcttccaaacttttcctccctgaacctgagggaaactaatctggattcactccctctggttgatacccactcaaaaaggacacttctgattaagacggttgaaactagagatggacaggttatcaacgaaacttctcagcatcacgatgaccttgaataaaaattgcacacactcagtgcagcaatatattaccagcaagaataaaaaagaaatccatatcttaaagaaacagctttcaagtgcctttctgcagtttttcaggagcgcaagatagatttggaataggaataagctctagttcttaacaaccgacactcctacaagatttagaaaaaagtttacaacataatctagtttacagaaaaatcttgtgctagaatactttttaaaaggtattttgaataccattaaaactgcttttttttttccagcaagtatccaaccaacttggttctgcttcaataaatctttggaaaaactcaaaaaaaaaaaaaaa

SEQ ID NO: 41 - DNA, 1787 bp, Homo sapiens
  guanidinoacetate N-methyltransferase transcript variant 2 (GAMT), epididymis secretory protein Li 20 (HEL-S-20), CCDS2, PIG2, TP53I2
  CDS (95)...(904): GAMT
gggcctgttggacccgcccccggcccacaagcccctgcagggagcgggcccgggcggcgcgcgatcgaggtcgggtcgccgtccagcctgcagcatgagcgcccccagcgcgacccccatcttcgcgcccggcgagaactgcagccccgcgtggggggcggcgcccgcggcctacgacgcagcggacacgcacctgcgcatcctgggcaagccggtgatggagcgctgggagaccccctatatgcacgcgctggccgccgccgcctcctccaaagggggccgggtcctggaggtgggctttggcatggccatcgcagcgtcaaaggtgcaggaggcgcccattgatgagcattggatcatcgagtgcaatgacggcgtcttccagcggctccgggactgggccccacggcagacacacaaggtcatccccttgaaaggcctgtgggaggatgtggcacccaccctgcctgacggtcactttgatgggatcctgtacgacacgtacccactctcggaggagacctggcacacacaccagttcaacttcatcaagaaccacgcctttcgcctgctgaagccggggggcgtcctcacctactgcaacctcacctcctggggggagctgatgaagtccaagtactcagacatcaccatcatgtttgaggtgcgcccacctgaagttccccatgggtctccaggaagtgaccttggatgggggtgggaaggggctgctggagccaccttgctacctggggagggtcccttcctgaccccctgggtgggctggactgtgctggttcatttagaaatcaaagtcctttgcctggcgcagtggctgccaggagcagtggctcaggtctataatcccagcactgtggaaggccgaggtgggcagattgcttgagcctaggagttcaagaccagcctgggctacagagcaagacctcatctttcctaaaaaaaaaaaatacaaaaaactagctgggcgtggtggcgtgtgcctgtactcccagctacttgggaggctgaggtaggaggattgcttgggccccaggggcagaggttgcagtgagcccagatcgaaccactgcactccagcctgggtaacagagccagaccctgtctcaagaaaaaagaaagaaagaaagaaagaaagaaaatttaaaaaaaaaatggaaatcaggctgggcgtggtggctcacacctgtgatcccggcacttcggaaggccaaggcgggtggatcacttgagcccaggagtttgagcctagcctggccaacatggcagaatcccatctctactaaaaatacaaaagttagccaggcgtggtggcgggcgcctgtaattccagctactcgggaggctgaggcatgagaatcacttgaacatgggaggcggaggttgctgtgagccgagattgcaccgttgtactccagcctgggcaacagaccgagactccatctcaacaaaacaaaaacaaaaaaaatggaaatcaaagtccctcaccagctcaacaacctcccatggctccccagtgccctgtggttcagcctaagccctgcgtgttcccctccctccagctgcctccacctggctgtctttgctggttcagcagtgcttgtctcgctgttccctctgcctggtggaggcggcctatctgagaagggctctatgtggttgccctgggctgctgttgtgagagccggctgggtgcctgtggcccctggggcagcttttcttccaaaatgggaactagtggcctgtgttctaaaaaaaaaaaaaaaaaa

SEQ ID NO: 42 - DNA, 2331 bp, Homo sapiens
  heat shock 70kDa protein 8 transcript variant 1 (HSPA8), lipopolysaccharide-associated protein 1 (LAP1), epididymis secretory sperm binding protein Li 72p (HEL-S-72p), N-myristoyltransferase inhibitor protein 71 (NIP71)
  CDS (136)...(2076): HSPA8
ccttctggaaggttctaagatagggtataagaggcagggtggcgggcggaaaccggtctcattgaactcgcctgcagctcttgggttttttgtggcttccttcgttattggagccaggcctacaccccagcaaccatgtccaagggacctgcagttggtattgatcttggcaccacctactcttgtgtgggtgttttccagcacggaaaagtcgagataattgccaatgatcagggaaaccgaaccactccaagctatgtcgcctttacggacactgaacggttgatcggtgatgccgcaaagaatcaagttgcaatgaaccccaccaacacagtttttgatgccaaacgtctgattggacgcagatttgatgatgctgttgtccagtctgatatgaaacattggccctttatggtggtgaatgatgctggcaggcccaaggtccaagtagaatacaagggagagaccaaaagcttctatccagaggaggtgtcttctatggttctgacaaagatgaaggaaattgcagaagcctaccttgggaagactgttaccaatgctgtggtcacagtgccagcttactttaatgactctcagcgtcaggctaccaaagatgctggaactattgctggtctcaatgtacttagaattattaatgagccaactgctgctgctattgcttacggcttagacaaaaaggttggagcagaaagaaacgtgctcatctttgacctgggaggtggcacttttgatgtgtcaatcctcactattgaggatggaatctttgaggtcaagtctacagctggagacacccacttgggtggagaagattttgacaaccgaatggtcaaccattttattgctgagtttaagcgcaagcataagaaggacatcagtgagaacaagagagctgtaagacgcctccgtactgcttgtgaacgtgctaagcgtaccctctcttccagcacccaggccagtattgagatcgattctctctatgaaggaatcgacttctatacctccattacccgtgcccgatttgaagaactgaatgctgacctgttccgtggcaccctggacccagtagagaaagcccttcgagatgccaaactagacaagtcacagattcatgatattgtcctggttggtggttctactcgtatccccaagattcagaagcttctccaagacttcttcaatggaaaagaactgaataagagcatcaaccctgatgaagctgttgcttatggtgcagctgtccaggcagccatcttgtctggagacaagtctgagaatgttcaagatttgctgctcttggatgtcactcctctttcccttggtattgaaactgctggtggagtcatgactgtcctcatcaagcgtaataccaccattcctaccaagcagacacagaccttcactacctattctgacaaccagcctggtgtgcttattcaggtttatgaaggcgagcgtgccatgacaaaggataacaacctgcttggcaagtttgaactcacaggcatacctcctgcaccccgaggtgttcctcagattgaagtcacttttgacattgatgccaatggtatactcaatgtctctgctgtggacaagagtacgggaaaagagaacaagattactatcactaatgacaagggccgtttgagcaaggaagacattgaacgtatggtccaggaagctgagaagtacaaagctgaagatgagaagcagagggacaaggtgtcatccaagaattcacttgagtcctatgccttcaacatgaaagcaactgttgaagatgagaaacttcaaggcaagattaacgatgaggacaaacagaagattctggacaagtgtaatgaaattatcaactggcttgataagaatcagactgctgagaaggaagaatttgaacatcaacagaaagagctggagaaagtttgcaaccccatcatcaccaagctgtaccagagtgcaggaggcatgccaggaggaatgcctgggggatttcctggtggtggagctcctccctctggtggtgcttcctcagggcccaccattgaagaggttgattaagccaaccaagtgtagatgtagcattgttccacacatttaaaacatttgaaggacctaaattcgtagcaaattctgtggcagttttaaaaagttaagctgctatagtaagttactgggcattctcaatacttgaatatggaacatatgcacaggggaaggaaataacattgcactttataaacactgtattgtaagtggaaaatgcaatgtcttaaataaaactatttaaaattggcaccataaaaaaaaaaaaaa

SEQ ID NO: 43 - DNA, 401 bp, Homo sapiens
  60S ribosomal protein L39, L39, RPL39P42, RPL39_23_1806
  CDS (68)...(223): RPL39
cttccgccagcttccctcctcttcctttctccgccatcgtggtgtgttcttgactccgctgctcgccatgtcttctcacaagactttcaggattaagcgattcctggccaagaaacaaaagcaaaatcgtcccattccccagtggattcggatgaaaactggaaataaaatcaggtacaactccaaaaggagacattggagaagaaccaagctgggtctataaggaattgcacatgagatggcacacatatttatgctgtctgaaggtcacgatcatgttaccatatcaagctgaaaatgtcaccactatctggagatttcgacgtgttttcctctctgaatctgttatgaacacgttggttggctggattcagtaataaatatgtaaggcctttcttttt

SEQ ID NO: 44 - DNA, 2211 bp, Homo sapiens
  adenosylhomocysteinase transcript variant 1 (AHCY, adoHcyase), S-adenosylhomocysteine hydrolase, S-adenosyl-L-homocysteine hydrolase (SAHH)
  CDS (140)...(1438): AHCY
atgaatatgcaagtgcgaggaagatatttaaaggcgtcggcgccacgcgcatatccctgctcggcgctgcccgcccagttcctgttcccagactgaggcccagcccccttcgcccgtttccatcacgagtgccgccagcatgtctgacaaactgccctacaaagtcgccgacatcggcctggctgcctggggacgcaaggccctggacattgctgagaacgagatgccgggcctgatgcgtatgcgggagcggtactcggcctccaagccactgaagggcgcccgcatcgctggctgcctgcacatgaccgtggagacggccgtcctcattgagaccctcgtcaccctgggtgctgaggtgcagtggtccagctgcaacatcttctccacccaggaccatgcggcggctgccattgccaaggctggcattccggtgtatgcctggaagggcgaaacggacgaggagtacctgtggtgcattgagcagaccctgtacttcaaggacgggcccctcaacatgattctggacgacgggggcgacctcaccaacctcatccacaccaagtacccgcagcttctgccaggcatccgaggcatctctgaggagaccacgactggggtccacaacctctacaagatgatggccaatgggatcctcaaggtgcctgccatcaatgtcaatgactccgtcaccaagagcaagtttgacaacctctatggctgccgggagtccctcatagatggcatcaagcgggccacagatgtgatgattgccggcaaggtagcggtggtagcaggctatggtgatgtgggcaagggctgtgcccaggccctgcggggtttcggagcccgcgtcatcatcaccgagattgaccccatcaacgcactgcaggctgccatggagggctatgaggtgaccaccatggatgaggcctgtcaggagggcaacatctttgtcaccaccacaggctgtattgacatcatccttggccggcactttgagcagatgaaggatgatgccattgtgtgtaacattggacactttgacgtggagatcgatgtcaagtggctcaacgagaacgccgtggagaaggtgaacatcaagccgcaggtggaccggtatcggttgaagaatgggcgccgcatcatcctgctggccgagggtcggctggtcaacctgggttgtgccatgggccaccccagcttcgtgatgagtaactccttcaccaaccaggtgatggcgcagatcgagctgtggacccatccagacaagtaccccgttggggttcatttcctgcccaagaagctggatgaggcagtggctgaagcccacctgggcaagctgaatgtgaagttgaccaagctaactgagaagcaagcccagtacctgggcatgtcctgtgatggccccttcaagccggatcactaccgctactgagagccaggtctgcgtttcaccctccagctgctgtccttgcccaggccccacctctcctccctaagagctaatggcaccaactttgtgattggtttgtcagtgtcccccatcgactctctggggctgatcacttagtttttggcctctgctgcagccgtcatactgttccaaatgtggcagcgggaacagagtaccctcttcaagccccggtcatgatggaggtcccagccacagggaaccatgagctcagtggtcttggaacagctcactaagtcagtccttccttagcctggaagtcagtagtggagtcacaaagcccatgtgttttgccatctaggccttcacctggtctgtggacttatacctgtgtgcttggtttacaggtccagtggttcttcagcccatgacagatgagaaggggctatattgaagggcaaagaggaactgttgtttgaattttcctgagagcctggcttagtgctgggccttctcttaaacctcattacaatgaggttagtacttttagtccctgttttacaggggttagaatagactgttaaggggcaactgagaaagaacagagaagtgacagctaggggttgagaggggccagaaaaacatgaatgcaggcagatttcgtgaaatctgccaccactttataaccagatggttcctttcacaaccctgggtcaaaaagagaataatttggcctataatgttaaaagaaagcaggaaggtgggtaaataaaaatcttggtgcctggaagaaaaaa

SEQ ID NO: 45 - DNA, 2022 bp, Homo sapiens
  eukaryotic translation elongation factor 1 alpha 2, eukaryotic elongation factor 1 A-2 (EEF1A2, EF-1-alpha-2, eEF1A-2, EEF1AL), elongation factor-1 alpha (EF1A), statin S1 (HS1, STN, STNL)
  CDS (330)...(1721): EEF1A2
gccccgcccccgcccgcggcgcgtttctcccccgcctcccgcgtccgtctttgcagcccgcgcctcccgcatcgcctcgcgtccccgtggcgcccgcccgcgcgcgtccgcgccccgccccctcccgcgcggttccgcattggcgtgctgcagggcgcggtgcactgcgccgccaccgtcaataggtggaccccctcccggagataaaaccgccggcgccggcgccgccagtccctctggctgagacctcggctccggaatcactgcagcccccctcgccctgagccagagcaccccgggtcccgccagcccctcacactcccagcaaaatgggcaaggagaagacccacatcaacatcgtggtcatcggccacgtggactccggaaagtccaccaccacgggccacctcatctacaaatgcggaggtattgacaaaaggaccattgagaagttcgagaaggaggcggctgagatggggaagggatccttcaagtatgcctgggtgctggacaagctgaaggcggagcgtgagcgcggcatcaccatcgacatctccctctggaagttcgagaccaccaagtactacatcaccatcatcgatgcccccggccaccgcgacttcatcaagaacatgatcacgggtacatcccaggcggactgcgcagtgctgatcgtggcggcgggcgtgggcgagttcgaggcgggcatctccaagaatgggcagacgcgggagcatgccctgctggcctacacgctgggtgtgaagcagctcatcgtgggcgtgaacaaaatggactccacagagccggcctacagcgagaagcgctacgacgagatcgtcaaggaagtcagcgcctacatcaagaagatcggctacaacccggccaccgtgccctttgtgcccatctccggctggcacggtgacaacatgctggagccctcccccaacatgccgtggttcaagggctggaaggtggagcgtaaggagggcaacgcaagcggcgtgtccctgctggaggccctggacaccatcctgccccccacgcgccccacggacaagcccctgcgcctgccgctgcaggacgtgtacaagattggcggcattggcacggtgcccgtgggccgggtggagaccggcatcctgcggccgggcatggtggtgacctttgcgccagtgaacatcaccactgaggtgaagtcagtggagatgcaccacgaggctctgagcgaagctctgcccggcgacaacgtcggcttcaatgtgaagaacgtgtcggtgaaggacatccggcggggcaacgtgtgtggggacagcaagtctgacccgccgcaggaggctgctcagttcacctcccaggtcatcatcctgaaccacccggggcagattagcgccggctactccccggtcatcgactgccacacagcccacatcgcctgcaagtttgcggagctgaaggagaagattgaccggcgctctggcaagaagctggaggacaaccccaagtccctgaagtctggagacgcggccatcgtggagatggtgccgggaaagcccatgtgtgtggagagcttctcccagtacccgcctctcggccgcttcgccgtgcgcgacatgaggcagacggtggccgtaggcgtcatcaagaacgtggagaagaagagcggcggcgccggcaaggtcaccaagtcggcgcagaaggcgcagaaggcgggcaagtgaagcgcgggcgcccgcggcgcgaccctccccggcggcgccgcgctccgaaccccggcccggcccccgccccgcccccgccccgcgcgccgctccggcgccccgcacccccgccaggcgcatgtctgcacctccgcttgccagaggccctcggtcagcgactggatgctcgccatcaaggtccagtggaagttcttcaagaggaaaggcgcccccgccccaggcttccgcgcccagcgctcgccacgctcagtgcccgttttaccaataaactgagcgaccccagaaaaaaaaaaaaaaaaaa

SEQ ID NO: 46 - DNA, 719 bp, Homo sapiens
  60S ribosomal protein L10a, L10A, neural precursor cell expressed developmentally down-regulated protein 6 (NEDD6), Csa-19
  CDS (35)...(688): RPL10A
agtctcttttccggttagcgcggcgtgagaagccatgagcagcaaagtctctcgcgacaccctgtacgaggcggtgcgggaagtcctgcacgggaaccagcgcaagcgccgcaagttcctggagacggtggagttgcagatcagcttgaagaactatgatccccagaaggacaagcgcttctcgggcaccgtcaggcttaagtccactccccgccctaagttctctgtgtgtgtcctgggggaccagcagcactgtgacgaggctaaggccgtggatatcccccacatggacatcgaggcgctgaaaaaactcaacaagaataaaaaactggtcaagaagctggccaagaagtatgatgcgtttttggcctcagagtctctgatcaagcagattccacgaatcctcggcccaggtttaaataaggcaggaaagttcccttccctgctcacacacaacgaaaacatggtggccaaagtggatgaggtgaagtccacaatcaagttccaaatgaagaaggtgttatgtctggctgtagctgttggtcacgtgaagatgacagacgatgagcttgtgtataacattcacctggctgtcaacttcttggtgtcattgctcaagaaaaactggcagaatgtccgggccttatatatcaagagcaccatgggcaagccccagcgcctatattaaggcacatttgaataaattctattaccagttc

SEQ ID NO: 47 - DNA, 3230 bp, Homo sapiens
  poly(A) binding protein, cytoplasmic 4 (inducible form) transcript variant 1, inducible poly(A)-binding protein, poly(A)-binding protein 4, polyadenylate-binding protein 4 (PABPC4, PABP-4, iPABP), activated-platelet protein 1 (APP-1, APP1)
  CDS (899)...(2881): PABPC4
ttcgaccagcagcgcccggggcgggcgggtataaatggagcggtggctccctcggccgcctctctccgccccgggtcgctgccgcctccgccgctttcgggcttcgcagcctgaggaaaaaaagagaaaaagataaaaaaaatctgaaaacgcttcaaaatcctgaaaaaaaaaaaggaaaagaaaaaacgaatcctcggagaacccgcggggaagtcactttcgtacgcttccggcctgccccgcgcccgccgccgcagcgcttggcgtccgtcggtctccgtccgtcggtccgggggtgagccgcccgcccggcccgccgtgccctccccccgctcgggccccgagccccgcgccccgcgcctgccccggcgcaccacgtgtccgtgctgcccttcgccgcccgcccggggctcgccgagtcggcgcccacaaagatttggtttccctctgccccggcggttgtaatcttaaaccgccggagcccgaggcctatatttatagagaaacgcgtgtccccgaggccgccgtgggcagcgtccggtcgcctcttaaaggatttttacccttcggaaggggattccccgtttaatttttttcctactttgattttttgaaatttggagcttcgcaccaggaccgcggagaagtgcaaagtcgcggggagggccgtattgtgcggagagccttttgtctgcggtgctgcggccgtgggagccggcccccgcctcccgtttccgtcccgtctccaagcccgccgactccagctcgtcctcgccgcgccggtgccacctgtgagccgcggcgcgggcccgggctccgaaggcgcccctttgtcctgcggcgggcccgataagaagtcctcctggcggggctcggggtggtggggggcggggagatgaacgctgcggccagcagctaccccatggcctccctgtacgtgggcgacctgcattcggacgtcaccgaggccatgctgtacgaaaagttcagccccgcggggcctgtgctgtccatccgggtctgccgcgatatgatcacccgccgctccctgggctatgcctacgtcaacttccagcagccggccgacgctgagcgggctttggacaccatgaactttgatgtgattaagggaaagccaatccgcatcatgtggtctcagagggatccctctttgagaaaatctggtgtgggaaacgtcttcatcaagaacctggacaaatctatagataacaaggcactttatgatactttttctgcttttggaaacatactgtcctgcaaggtggtgtgtgatgagaacggctctaagggttatgcctttgtccacttcgagacccaagaggctgccgacaaggccatcgagaagatgaatggcatgctcctcaatgaccgcaaagtatttgtgggcagattcaagtctcgcaaagagcgggaagctgagcttggagccaaagccaaggaattcaccaatgtttatatcaaaaactttggggaagaggtggatgatgagagtctgaaagagctattcagtcagtttggtaagaccctaagtgtcaaggtgatgagagatcccaatgggaaatccaaaggctttggctttgtgagttacgaaaaacacgaggatgccaataaggctgtggaagagatgaatggaaaagaaataagtggtaaaatcatatttgtaggccgtgcacaaaagaaagtagaacggcaggcagagttaaaacggaaatttgaacagttgaaacaggagagaattagtcgatatcagggggtgaatctctacattaagaacttggatgacactattgatgatgagaaattaaggaaagaattttctccttttggatcaattaccagtgctaaggtaatgctggaggatggaagaagcaaagggtttggcttcgtctgcttctcatctcctgaagaagcaaccaaagcagtcactgagatgaatggacgcattgtgggctccaagccactatatgttgccctggcccagaggaaggaagagagaaaggctcacctgaccaaccagtatatgcaacgagtggctggaatgagagcacttcctgccaatgccatcttaaatcagttccagcctgcagcgggtggctactttgtgccagcagtcccacaggctcagggaaggcctccatattatacacctaaccagttagcacagatgaggcctaatccacgctggcagcaaggtgggagacctcaaggcttccaaggaatgccaagtgctatacgccagtctgggcctcgtccaactcttcgccatctggctccaactggtaatgctccggcctctcgtggcctccctactaccactcagagagtcgggtctgagtgcccggaccgcttggctatggactttggtggggctggtgccgcccagcaagggctgactgacagctgccagtctggaggcgttcccacagctgtgcagaacttagcgccacgcgctgctgttgctgctgctgctccccgggctgttgccccctacaaatacgcctccagtgtccgcagccctcatcctgccatacagcctctgcaggcaccccagcctgcggtccatgtgcaggggcaggagccactgactgcctccatgctggctgcagcacccccccaggaacagaagcagatgctgggagaacgcttgttcccactcatccaaacaatgcattcaaatctggctgggaagatcacgggaatgctgctggagatagacaactctgagctgctgcacatgttagagtcccccgagtctctccgctccaaggtggatgaagctgtagcagttctacaggctcatcatgccaagaaagaagctgcccagaaggtgggcgctgttgctgctgctacctcttagacaaggaaaaaccgattcaaaagccaaataaccccttatggaattcaactcaaggtttgaagacttcctagcttgtcctatggacctcaacaccaaggattacaaattgcaaatttaataggtcattttgtatcaaaaggtcaattatgaagcacctagaatttttcaattatacgaatatgttctttgggttctgctgtggcccagacagtgttaactttttttttattgtgggttttgattttttcccccagaaattggttttatttgatgtacccaagtcttacgtttcccaataaagaaaaaaaatctccataaaactgaaaaaaaaaaaaaaaaaaaaaaaaaa

SEQ ID NO: 48 - DNA, 956 bp, Homo sapiens
  40S ribosomal protein S4, X-linked, ribosomal protein S4X, S4X, single copy abundant mRNA protein (SCAR), cell cycle gene 2 (CCG2), DXS306, SCR10
  CDS (97)...(888): RPS4X
gggcggagcagctgaaaatccggcgcgcgcagtctccagccccaatttctacgcgcaccggaagacggaggtcctctttccttgcctaacgcagccatggctcgtggtcccaagaagcatctgaagcgggtggcagctccaaagcattggatgctggataaattgaccggtgtgtttgctcctcgtccatccaccggtccccacaagttgagagagtgtctccccctcatcattttcctgaggaacagacttaagtatgccctgacaggagatgaagtaaagaagatttgcatgcagcggttcattaaaatcgatggcaaggtccgaactgatataacctaccctgctggattcatggatgtcatcagcattgacaagacgggagagaatttccgtctgatctatgacaccaagggtcgctttgctgtacatcgtattacacctgaggaggccaagtacaagttgtgcaaagtgagaaagatctttgtgggcacaaaaggaatccctcatctggtgactcatgatgcccgcaccatccgctaccccgatcccctcatcaaggtgaatgataccattcagattgatttggagactggcaagattactgatttcatcaagttcgacactggtaacctgtgtatggtgactggaggtgctaacctaggaagaattggtgtgatcaccaacagagagaggcaccctggatcttttgacgtggttcacgtgaaagatgccaatggcaacagctttgccactcgactttccaacatttttgttattggcaagggcaacaaaccatggatttctcttccccgaggaaagggtatccgcctcaccattgctgaagagagagacaaaagactggcggccaaacagagcagtgggtgaaatgggtccctgggtgacatgtcagatctttgtacgtaattaaaaatattgtggcaggattaatagca

SEQ ID NO: 49 - DNA, 1129 bp, Homo sapiens
  60S ribosomal protein L31 transcript variant 2, L31
  CDS (88)...(474): RPL31
tggcgacccggaagttgtacttgcaactgcggctttccttctcccacaatccttcgcgctcttcctttccaacttggacgctgcagaatggctcccgcaaagaagggtggcgagaagaaaaagggccgttctgccatcaacgaagtggtaacccgagaatacaccatcaacattcacaagcgcatccatggagtgggcttcaagaagcgtgcacctcgggcactcaaagagattcggaaatttgccatgaaggagatgggaactccagatgtgcgcattgacaccaggctcaacaaagctgtctgggccaaaggaataaggaatgtgccataccgaatccgtgtgcggctgtccagaaaacgtaatgaggatgaagattcaccaaataagctatatactttggttacctatgtacctgttaccactttcaaaatttctgtgctaaacagtgttacagtcgccaagagcccataaagggagccctcctggaagtggatgaggccttgggtctcggctcttcattgcttcctgagctgcagcagatgcctttacaaccaagctcaccgaggacgtctgtctcccatattaccctggcagagggccaggcctgttctacacggccggggtttcaacaaggtactgatgtcttctgcccttgcctcttcgacaggcaagtaataagacttaagtgaagagaattctttaggcacacaaattcacatttgatgtaatctcattatacttcctgatctgtgattgaaaactttcatttcgtaactagtatgtctgtcccacctttaaaaagtttttcattatgaaagtaagtatttgttagaattaagtctatttaaatgaaaaaaacttagatatgagtctgcatggcctcaggaaaatgatgttttaaaatagagattttaggttgtctgcactctagcttttttgtcgttttcttaaggcttttttaactgcatcaaaaattcagatacgaaacatacactaaaaaataatacatcatatcttaatttccactgaacttgatttaaattcagagttacacagtatgaatatcacaatcagatatgttcaaaaaggtctgaacaattgattttctgaaaccatgaaggactac

SEQ ID NO: 50 - DNA, 512 bp, Homo sapiens
  60S acidic ribosomal protein P1 transcript variant 1, LP1, P1, RPP1, ribosomal protein, large, P1, acidic ribosomal phosphoprotein P1
  CDS (130)...(474): RPLP1
cctttcctcagctgccgccaaggtgctcggtccttccgaggaagctaaggctgcgttggggtgaggccctcacttcatccggcgactagcaccgcgtccggcagcgccagccctacactcgcccgcgccatggcctctgtctccgagctcgcctgcatctactcggccctcattctgcacgacgatgaggtgacagtcacggaggataagatcaatgccctcattaaagcagccggtgtaaatgttgagcctttttggcctggcttgtttgcaaaggccctggccaacgtcaacattgggagcctcatctgcaatgtaggggccggtggacctgctccagcagctggtgctgcaccagcaggaggtcctgccccctccactgctgctgctccagctgaggagaagaaagtggaagcaaagaaagaagaatccgaggagtctgatgatgacatgggctttggtctttttgactaaacctcttttataacatgttcaataaaaagctgaacttt

SEQ ID NO: 51 - DNA, 646 bp, Homo sapiens
  40S ribosomal protein S11, S11
  CDS (93)...(569): RPS11
tctccttacgtcacttcctctccagcccctgcgtaatcgataaggaaacccggacgctgctgcccctttctttttttcaggcggccgggaagatggcggacattcagactgagcgtgcctaccaaaagcagccgaccatctttcaaaacaagaagagggtcctgctgggagaaactggcaaggagaagctcccgcggtactacaagaacatcggtctgggcttcaagacacccaaggaggctattgagggcacctacattgacaagaaatgccccttcactggtaatgtgtccattcgagggcggatcctctctggcgtggtgaccaagatgaagatgcagaggaccattgtcatccgccgagactatctgcactacatccgcaagtacaaccgcttcgagaagcgccacaagaacatgtctgtacacctgtccccctgcttcagggacgtccagatcggtgacatcgtcacagtgggcgagtgccggcctctgagcaagacagtgcgcttcaacgtgctcaaggtcaccaaggctgccggcaccaagaagcagttccagaagttctgaggctggacatcggcccgctccccacaatgaaataaagttattttctcattcccaggccagacttgggatcttccgcg

SEQ ID NO: 52 - DNA, 602 bp, Homo sapiens
  60S ribosomal protein L26, L26, DBA11
  CDS (97)...(534): RPL26
ataggtctcgcgagatctttggtaaacttacagaaccggaagcagcgtgtagttctcttcccttttgcggccatcaccgaagcgggagcggccaaaatgaagtttaatccctttgtgacttccgaccgaagcaagaatcgcaaaaggcatttcaatgcaccttcccacattcgaaggaagattatgtcttcccctctttccaaagagctgagacagaagtacaacgtgcgatccatgcccatccgaaaggatgatgaagttcaggttgtacgtggacactataaaggtcagcaaattggcaaagtagtccaggtttacaggaagaaatatgttatctacattgaacgggtgcagcgggaaaaggctaatggcacaactgtccacgtaggcattcaccccagcaaggtggttatcactaggctaaaactggacaaagaccgcaaaaagatcctcgaacggaaagccaaatctcgccaagtaggaaaggaaaagggcaaatacaaggaagaaaccattgagaagatgcaggaataaagtaatcttatatacaagctttgattaaaacttgaaacaaagagcctgaaaaaaaaaaaaaaaaaaaa

SEQ ID NO: 53 - DNA, 939 bp, Homo sapiens
  60S ribosomal protein L14 transcript variant 1, L14
  CDS (134)...(781): RPL14
cttctcgcctaacgccgccaacatggtgagtcttactgttgcgggctccggggccgtcgaccatgccgctcgacctccacctccgctgggaagctgaggcgccaaacggctcccagagggtcccgggaagcgcatggtgttcaggcgcttcgtggaggttggccgggtggcctatgtctcctttggacctcatgccggaaaattggtcgcgattgtagatgttattgatcagaacagggctttggtcgatggaccttgcactcaagtgaggagacaggccatgcctttcaagtgcatgcagctcactgatttcatcctcaagtttccgcacagtgcccaccagaagtatgtccgacaagcctggcagaaggcagacatcaatacaaaatgggcagccacacgatgggccaagaagattgaagccagagaaaggaaagccaagatgacagattttgatcgttttaaagttatgaaggcaaagaaaatgaggaacagaataatcaagaatgaagttaagaagcttcaaaaggcagctctcctgaaagcttctcccaaaaaagcacctggtactaagggtactgctgctgctgctgctgctgctgctgctgctaaagttccagcaaaaaagatcaccgccgcgagtaaaaaggctccagcccagaaggttcctgcccagaaagccacaggccagaaagcagcgcctgctccaaaagctcagaagggtcaaaaagctccagcccagaaagcacctgctccaaaggcatctggcaagaaagcataagtggcaatcataaaaagtaataaaggttctttttgacctgttgacaaatgtatttaagcctttggatttaaagcctgttgaggctggagttaggaggcagattgatagtaggattataataaacattaaataatcagttcaaaaaaaaaaaaaaaaaa

SEQ ID NO: 54 - DNA, 1586 bp, Homo sapiens
  60S ribosomal protein L37, L37, L37a, G1.16
  CDS (101)...(394): RPL37
gcgccccgcaggaagtgcttccctgggcggaagcttctgagcgtgatatagcggaagtgccttctcttccggtctttctggtctcggccgcagaagcgagatgacgaagggaacgtcatcgtttggaaagcgtcgcaataagacgcacacgttgtgccgccgctgtggctctaaggcctaccaccttcagaagtcgacctgtggcaaatgtggctaccctgccaagcgcaagagaaagtataactggagtgccaaggctaaaagacgaaataccaccggaactggtcgaatgaggcacctaaaaattgtataccgcagattcaggcatggattccgtgaaggaacaacacctaaacccaagagggcagctgttgcagcatccagttcatcttaagaatgtcaacgattagtcatgcaataaatgttctggttttaaaaaatacatatctggttttggtaaggtatttttaatcaattaggcttgtagtatcagtgaaatactgtaggtttagggactgggctagcttcatatcagatttacttgttaagtgactgttttggaatgtttacttttggactgggtttgtaacacggttaaaggcaatgagaaacaagcagaattccaggagtccttgaagcagagggcactggaagacaatatagcagattaaaatagcacagctcatgtggcataggtgggtattttagatgtttgagtaaatttgaaagagtatgatgtttaaattacctttagcaacatgttcatctgctatgctgtcatgactagggggatgattattagtcacatagagcttgggagtaccactggaaacgtatgggtaggagtttaggtggcttctgtttttcaaaagatgatcttatcctagtatctgtaatgctcacttggcacacctgacttgtgggctgtgtgtaaggtggctagctaagtgaaaaaagcctgctaggtgtgagtcaacttaagaatatgtaaataggtttgagaaaaagtagggcttgggtgcaagtaaagattgagcaggaaataaaggaaaatcaagtataatccctgagatttgtagactaaaggcaatgatgtgggactacttggtcgaatttttttagccctcaacttggtaattgggtgtttctgtgttaaagcactgaaacttgctgtcgtgccttcctagttttcgtggtttattgacagggttgggggttttttttgtttttttaaaatgaagggacaaagtcaactggactgctgagtgagagggcaggggcagttgaagggaacatgaattgctggaacagctacataaaatagtgatgtagccaagtcatgctatttaaattataattctccactgtgtttagaataacatctgaggttcttaacctggccttggaagggtatcacttttacttgtaacctggaatggctttataatgtgctagctaattgctactctcatcttgtattttaactcctaatttacccttcaggtctcagcttcagaacattcacttataaagaaaccctgctgattaaatctctcttgggcttcctcccaaaaaaaaaaaaaaaa

SEQ ID NO: 55 - DNA, 866 bp, Homo sapiens
  60S ribosomal protein L7, L7, humL7-1
  CDS (23)...(769): RPL7
tcctctttttccggctggaaccatggagggtgtagaagagaagaagaaggaggttcctgctgtgccagaaacccttaagaaaaagcgaaggaatttcgcagagctgaagatcaagcgcctgagaaagaagtttgcccaaaagatgcttcgaaaggcaaggaggaagcttatctatgaaaaagcaaagcactatcacaaggaatataggcagatgtacagaactgaaattcgaatggcgaggatggcaagaaaagctggcaacttctatgtacctgcagaacccaaattggcgtttgtcatcagaatcagaggtatcaatggagtgagcccaaaggttcgaaaggtgttgcagcttcttcgccttcgtcaaatcttcaatggaacctttgtgaagctcaacaaggcttcgattaacatgctgaggattgtagagccatatattgcatgggggtaccccaatctgaagtcagtaaatgaactaatctacaagcgtggttatggcaaaatcaataagaagcgaattgctttgacagataacgctttgattgctcgatctcttggtaaatacggcatcatctgcatggaggatttgattcatgagatctatactgttggaaaacgcttcaaagaggcaaataacttcctgtggcccttcaaattgtcttctccacgaggtggaatgaagaaaaagaccacccattttgtagaaggtggagatgctggcaacagggaggaccagatcaacaggcttattagaagaatgaactaaggtgtctaccatgattatttttctaagctggttggttaataaacagtacctgctctcaaattgaaataaaaaaaaaaaaaaaaaaaaaaaaaaaaaa

SEQ ID NO: 56 - DNA, 1941 bp, Homo sapiens
  heterogeneous nuclear ribonucleoprotein A1 transcript variant 2 (HNRNPA1, hnRNP A1, hnRNP-A1, HNRPA1), heterogeneous nuclear ribonucleoprotein B2 protein, hnRNP A1-like 3 (HNRPA1L3), IBMPFD3, single-strand DNA-binding protein UP1, helix-destabilizing protein
  CDS (105)...(1223): HNRNPA1
gagagggcgaaggtaggctggcagatacgttcgtcagcttgctcctttctgcccgtggacgccgccgaagaagcatcgttaaagtctctcttcaccctgccgtcatgtctaagtcagagtctcctaaagagcccgaacagctgaggaagctcttcattggagggttgagctttgaaacaactgatgagagcctgaggagccattttgagcaatggggaacgctcacggactgtgtggtaatgagagatccaaacaccaagcgctccaggggctttgggtttgtcacatatgccactgtggaggaggtggatgcagctatgaatgcaaggccacacaaggtggatggaagagttgtggaaccaaagagagctgtctccagagaagattctcaaagaccaggtgcccacttaactgtgaaaaagatatttgttggtggcattaaagaagacactgaagaacatcacctaagagattattttgaacagtatggaaaaattgaagtgattgaaatcatgactgaccgaggcagtggcaagaaaaggggctttgcctttgtaacctttgacgaccatgactccgtggataagattgtcattcagaaataccatactgtgaatggccacaactgtgaagttagaaaagccctgtcaaagcaagagatggctagtgcttcatccagccaaagaggtcgaagtggttctggaaactttggtggtggtcgtggaggtggtttcggtgggaatgacaacttcggtcgtggaggaaacttcagtggtcgtggtggctttggtggcagccgtggtggtggtggatatggtggcagtggggatggctataatggatttggtaatgatggtggttatggaggaggcggccctggttactctggaggaagcagaggctatggaagtggtggacagggttatggaaaccagggcagtggctatggcgggagtggcagctatgacagctataacaacggaggcggaggcggctttggcggtggtagtggaagcaattttggaggtggtggaagctacaatgattttgggaattacaacaatcagtcttcaaattttggacccatgaagggaggaaattttggaggcagaagctctggcccctatggcggtggaggccaatactttgcaaaaccacgaaaccaaggtggctatggcggttccagcagcagcagtagctatggcagtggcagaagattttaattaggaaacaaagcttagcaggagaggagagccagagaagtgacagggaagctacaggttacaacagatttgtgaactcagccaagcacagtggtggcagggcctagctgctacaaagaagacatgttttagacaaatactcatgtgtatgggcaaaaaactcgaggactgtatttgtgactaattgtataacaggttattttagtttctgttctgtggaaagtgtaaagcattccaacaaagggttttaatgtagatttttttttttgcaccccatgctgttgattgctaaatgtaacagtctgatcgtgacgctgaataaatgtcttttttttaatgtgctgtgtaaagttagtctactcttaagccatcttggtaaatttccccaacagtgtgaagttagaattccttcagggtgatgccaggttctatttggaatttatatacaacctgcttgggtggagaagccattgtcttcggaaaccttggtgtagttgaactgatagttactgttgtgacctgaagttcaccattaaaagggattacccaagcaaaatcatggaatggttataaaagtgattgttggcacatcctatgcaatatatctaaattgaataatggtaccagataaaattatagatgggaatgaagcttgtgtatccattatcatgtgtaatcaataaacgatttaattctcttgaaaaaaaaaaaaaaaaaa

SEQ ID NO: 57 - DNA, 705 bp, Homo sapiens
  40S ribosomal protein S8, S8, OK/SW-cl.83
  CDS (24)...(650): RPS8
ctctttccagccagcgccgagcgatgggcatctctcgggacaactggcacaagcgccgcaaaaccgggggcaagagaaagccctaccacaagaagcggaagtatgagttggggcgcccagctgccaacaccaagattggcccccgccgcatccacacagtccgtgtgcggggaggtaacaagaaataccgtgccctgaggttggacgtggggaatttctcctggggctcagagtgttgtactcgtaaaacaaggatcatcgatgttgtctacaatgcatctaataacgagctggttcgtaccaagaccctggtgaagaattgcatcgtgctcatcgacagcacaccgtaccgacagtggtacgagtcccactatgcgctgcccctgggccgcaagaagggagccaagctgactcctgaggaagaagagattttaaacaaaaaacgatctaaaaaaattcagaagaaatatgatgaaaggaaaaagaatgccaaaatcagcagtctcctggaggagcagttccagcagggcaagcttcttgcgtgcatcgcttcaaggccgggacagtgtggccgagcagatggctatgtgctagagggcaaagagttggagttctatcttaggaaaatcaaggcccgcaaaggcaaataaatccttgttttgtcttcacccatgtaataaaggtgtttattgttttgttcccaca

SEQ ID NO: 58 - DNA, 1401 bp, Homo sapiens
  glyceraldehyde-3-phosphate dehydrogenase transcript variant 1 (GAPDH, G3PD; GAPD), peptidyl-cysteine S-nitrosylase GAPDH, aging-associated gene 9 protein, epididymis secretory sperm binding protein Li 162eP (HEL-S-162eP)
  CDS (175)...(1182): GAPDH
ggctgggactggctgagcctggcgggaggcggggtccgagtcaccgcctgccgccgcgcccccggtttctataaattgagcccgcagcctcccgcttcgctctctgctcctcctgttcgacagtcagccgcatcttcttttgcgtcgccagccgagccacatcgctcagacaccatggggaaggtgaaggtcggagtcaacggatttggtcgtattgggcgcctggtcaccagggctgcttttaactctggtaaagtggatattgttgccatcaatgaccccttcattgacctcaactacatggtttacatgttccaatatgattccacccatggcaaattccatggcaccgtcaaggctgagaacgggaagcttgtcatcaatggaaatcccatcaccatcttccaggagcgagatccctccaaaatcaagtggggcgatgctggcgctgagtacgtcgtggagtccactggcgtcttcaccaccatggagaaggctggggctcatttgcaggggggagccaaaagggtcatcatctctgccccctctgctgatgcccccatgttcgtcatgggtgtgaaccatgagaagtatgacaacagcctcaagatcatcagcaatgcctcctgcaccaccaactgcttagcacccctggccaaggtcatccatgacaactttggtatcgtggaaggactcatgaccacagtccatgccatcactgccacccagaagactgtggatggcccctccgggaaactgtggcgtgatggccgcggggctctccagaacatcatccctgcctctactggcgctgccaaggctgtgggcaaggtcatccctgagctgaacgggaagctcactggcatggccttccgtgtccccactgccaacgtgtcagtggtggacctgacctgccgtctagaaaaacctgccaaatatgatgacatcaagaaggtggtgaagcaggcgtcggagggccccctcaagggcatcctgggctacactgagcaccaggtggtctcctctgacttcaacagcgacacccactcctccacctttgacgctggggctggcattgccctcaacgaccactttgtcaagctcatttcctggtatgacaacgaatttggctacagcaacagggtggtggacctcatggcccacatggcctccaaggagtaagacccctggaccaccagccccagcaagagcacaagaggaagagagagaccctcactgctggggagtccctgccacactcagtcccccaccacactgaatctcccctcctcacagttgccatgtagaccccttgaagaggggaggggcctagggagccgcaccttgtcatgtaccatcaataaagtaccctgtgctcaaccaaaaaaaaaaaaaaaaaaa

SEQ ID NO: 59 - DNA, 903 bp, Homo sapiens
  60S ribosomal protein L8 transcript variant 1, L8
  CDS (67)...(840): RPL8
agataaggccgctcgctgacgccgtgtttcctctttcggccgcgctggtgaacaggacccgtcgccatgggccgtgtgatccgtggacagaggaagggcgccgggtctgtgttccgcgcgcacgtgaagcaccgtaaaggcgctgcgcgcctgcgcgccgtggatttcgctgagcggcacggctacatcaagggcatcgtcaaggacatcatccacgacccgggccgcggcgcgcccctcgccaaggtggtcttccgggatccgtatcggtttaagaagcggacggagctgttcattgccgccgagggcattcacacgggccagtttgtgtattgcggcaagaaggcccagctcaacattggcaatgtgctccctgtgggcaccatgcctgagggtacaatcgtgtgctgcctggaggagaagcctggagaccgtggcaagctggcccgggcatcagggaactatgccaccgttatctcccacaaccctgagaccaagaagacccgtgtgaagctgccctccggctccaagaaggttatctcctcagccaacagagctgtggttggtgtggtggctggaggtggccgaattgacaaacccatcttgaaggctggccgggcgtaccacaaatataaggcaaagaggaactgctggccacgagtacggggtgtggccatgaatcctgtggagcatccttttggaggtggcaaccaccagcacatcggcaagccctccaccatccgcagagatgcccctgctggccgcaaagtgggtctcattgctgcccgccggactggacgtctccggggaaccaagactgtgcaggagaaagagaactagtgctgagggcctcaataaagtttgtgtttatgccaaaaaaaaaaaaaaaaaaaaaaaaaaaaa

SEQ ID NO: 60 - DNA, 737 bp, Homo sapiens
  60S ribosomal protein L29, L29, ribosomal protein YL43 homologue, heparin/heparan sulfate-interacting protein, heparin/heparan sulfate-binding protein, HP/HS-interacting protein, cell surface heparin-binding protein (HIP), HUMRPL29, RPL29P10; RPL29_3_370
  CDS (95)...(574): RPL29
ttccggcgttgttgaccctatttcccgtgctgcaccgcagcccctttctcttccggttctaggcgcttcgggagccgcggcttatggtgcagacatggccaagtccaagaaccacaccacacacaaccagtcccgaaaatggcacagaaatggtatcaagaaaccccgatcacaaagatacgaatctcttaagggggtggaccccaagttcctgaggaacatgcgctttgccaagaagcacaacaaaaagggcctaaagaagatgcaggccaacaatgccaaggccatgagtgcacgtgccgaggctatcaaggccctcgtaaagcccaaggaggttaagcccaagatcccaaagggtgtcagccgcaagctcgatcgacttgcctacattgcccaccccaagcttgggaagcgtgctcgtgcccgtattgccaaggggctcaggctgtgccggccaaaggccaaggccaaggccaaggccaaggatcaaaccaaggcccaggctgcagccccagcttcagttccagctcaggctcccaaacgtacccaggcccctacaaaggcttcagagtagatatctctgccaacatgaggacagaaggactggtgcgaccccccacccccgcccctgggctaccatctgcatggggctggggtcctcctgtgctatttgtacaaataaacctgaggcaggaaaaaaaaaaaaaaaaaaaaaaaaaaaaaaaaaaaaaaaaaaa

SEQ ID NO: 61 - DNA, 950 bp, Homo sapiens
  40S ribosomal protein S3a transcript variant 1, S3A, v-fos transformation effector protein 1, fte-1, FTE1, MFTL
  CDS (81)...(875): RPS3A
tagacggcgcgccccgcccccgtacgcctaagttctcgcgcgactcccacttccgcccttttggctctctgaccagcaccatggcggttggcaagaacaagcgccttacgaaaggcggcaaaaagggagccaagaagaaagtggttgatccattttctaagaaagattggtatgatgtgaaagcacctgctatgttcaatataagaaatattggaaagacgctcgtcaccaggacccaaggaaccaaaattgcatctgatggtctcaagggtcgtgtgtttgaagtgagtcttgctgatttgcagaatgatgaagttgcatttagaaaattcaagctgattactgaagatgttcagggtaaaaactgcctgactaacttccatggcatggatcttacccgtgacaaaatgtgttccatggtcaaaaaatggcagacaatgattgaagctcacgttgatgtcaagactaccgatggttacttgcttcgtctgttctgtgttggttttactaaaaaacgcaacaatcagatacggaagacctcttatgctcagcaccaacaggtccgccaaatccggaagaagatgatggaaatcatgacccgagaggtgcagacaaatgacttgaaagaagtggtcaataaattgattccagacagcattggaaaagacatagaaaaggcttgccaatctatttatcctctccatgatgtcttcgttagaaaagtaaaaatgctgaagaagcccaagtttgaattgggaaagctcatggagcttcatggtgaaggcagtagttctggaaaagccactggggacgagacaggtgctaaagttgaacgagctgatggatatgaaccaccagtccaagaatctgtttaaagttcagacttcaaatagtggcaaataaaaagtgctatttgtgatggtttgcttctgaaaaaaaaaaaaaaaaaa

SEQ ID NO: 62 - DNA, 893 bp, Homo sapiens
  60S ribosomal protein L18 transcript variant 1, L18
  CDS (276)...(842): RPL18
gaaagctatcgagaacacggcctgggtagggccagagaggcccccgacgtgctggcccttccctcttggacgttgcgcttgttcctgcgctctatgctctctgccgttatcgcccggctagtcagtcgtccaactcaccacagagaagtccggatcgtggtagagcgccgcgtcgcacccatgtgacgtcacggcggcgccactcgcttgaggctttccccgcccaccccagcccgttctctctttccggacctggccgagcaggaggcgccatcatgggagtggacatccgccataacaaggaccgaaaggttcggcgcaaggagcccaagagccaggatatctacctgaggctgttggtcaagttatacaggtttctggccagaagaaccaactccacattcaaccaggttgtgttgaagaggttgtttatgagtcgcaccaaccggccgcctctgtccctttcccggatgatccggaagatgaagcttcctggccgggaaaacaagacggccgtggttgtggggaccataactgatgatgtgcgggttcaggaggtacccaaactgaaggtatgtgcactgcgcgtgaccagccgggcccgcagccgcatcctcagggcagggggcaagatcctcactttcgaccagctggccctggactcccctaagggctgtggcactgtcctgctctccggtcctcgcaagggccgagaggtgtaccggcatttcggcaaggccccaggaaccccgcacagccacaccaaaccctacgtccgctccaagggccggaagttcgagcgtgccagaggccgacgggccagccgaggctacaaaaactaaccctggatcctactctcttattaaaaagatttttgctgacagtgcaaaaaa

SEQ ID NO: 63 - DNA, 557 bp, Homo sapiens
  60S ribosomal protein L36 transcript variant 2, L36
  CDS (174)...(491): RPL36
gtttcccgcactgccggtatccgccgccatccggactcccgggtcctctgtgcaggttggaggatggttggttgtggcgagcgaggctgaaggagccgggacgcggggctctgggcctcgggaactgagccggtactcacctccgccccttctccccgtcgctgtccgcagccatggccctacgctaccctatggccgtgggcctcaacaagggccacaaagtgaccaagaacgtgagcaagcccaggcacagccgacgccgcgggcgtctgaccaaacacaccaagttcgtgcgggacatgattcgggaggtgtgtggctttgccccgtacgagcggcgcgccatggagttactgaaggtctccaaggacaaacgggccctcaaatttatcaagaaaagggtggggacgcacatccgcgccaagaggaagcgggaggagctgagcaacgtactggccgccatgaggaaagctgctgccaagaaagactgagcccctcccctgccctctccctgaaataaagaacagcttgacagaaaaaaaaaaaaaaaaaaaaaa

SEQ ID NO: 64 - DNA, 7343 bp, Homo sapiens
  agrin precursor, agrin proteoglycan (AGRN)
  CDS (51)...(6188): AGRN
cccgtccccggcgcggcccgcgcgctcctccgccgcctctcgcctgcgccatggccggccggtcccacccgggcccgctgcggccgctgctgccgctccttgtggtggccgcgtgcgtcctgcccggagccggcgggacatgcccggagcgcgcgctggagcggcgcgaggaggaggcgaacgtggtgctcaccgggacggtggaggagatcctcaacgtggacccggtgcagcacacgtactcctgcaaggttcgggtctggcggtacttgaagggcaaagacctggtggcccgggagagcctgctggacggcggcaacaaggtggtgatcagcggctttggagaccccctcatctgtgacaaccaggtgtccactggggacaccaggatcttctttgtgaaccctgcacccccatacctgtggccagcccacaagaacgagctgatgctcaactccagcctcatgcggatcaccctgcggaacctggaggaggtggagttctgtgtggaagataaacccgggacccacttcactccagtgcctccgacgcctcctgatgcgtgccggggaatgctgtgcggcttcggcgccgtgtgcgagcccaacgcggaggggccgggccgggcgtcctgcgtctgcaagaagagcccgtgccccagcgtggtggcgcctgtgtgtgggtcggacgcctccacctacagcaacgaatgcgagctgcagcgggcgcagtgcagccagcagcgccgcatccgcctgctcagccgcgggccgtgcggctcgcgggacccctgctccaacgtgacctgcagcttcggcagcacctgtgcgcgctcggccgacgggctgacggcctcgtgcctgtgccccgcgacctgccgtggcgcccccgaggggaccgtctgcggcagcgacggcgccgactaccccggcgagtgccagctcctgcgccgcgcctgcgcccgccaggagaatgtcttcaagaagttcgacggcccttgtgacccctgtcagggcgccctccctgacccgagccgcagctgccgtgtgaacccgcgcacgcggcgccctgagatgctcctacggcccgagagctgccctgcccggcaggcgccagtgtgtggggacgacggagtcacctacgaaaacgactgtgtcatgggccgatcgggggccgcccggggtctcctcctgcagaaagtgcgctccggccagtgccagggtcgagaccagtgcccggagccctgccggttcaatgccgtgtgcctgtcccgccgtggccgtccccgctgctcctgcgaccgcgtcacctgtgacggggcctacaggcccgtgtgtgcccaggacgggcgcacgtatgacagtgattgctggcggcagcaggctgagtgccggcagcagcgtgccatccccagcaagcaccagggcccgtgtgaccaggccccgtccccatgcctcggggtgcagtgtgcatttggggcgacgtgtgctgtgaagaacgggcaggcagcgtgtgaatgcctgcaggcgtgctcgagcctctacgatcctgtgtgcggcagcgacggcgtcacatacggcagcgcgtgcgagctggaggccacggcctgtaccctcgggcgggagatccaggtggcgcgcaaaggaccctgtgaccgctgcgggcagtgccgctttggagccctgtgcgaggccgagaccgggcgctgcgtgtgcccctctgaatgcgtggctttggcccagcccgtgtgtggctccgacgggcacacgtaccccagcgagtgcatgctgcacgtgcacgcctgcacacaccagatcagcctgcacgtggcctcagctggaccctgtgagacctgtggagatgccgtgtgtgcttttggggctgtgtgctccgcagggcagtgtgtgtgtccccggtgtgagcaccccccgcccggccccgtgtgtggcagcgacggtgtcacctacggcagtgcctgcgagctacgggaagccgcctgcctccagcagacacagatcgaggaggcccgggcagggccgtgcgagcaggccgagtgcggttccggaggctctggctctggggaggacggtgactgtgagcaggagctgtgccggcagcgcggtggcatctgggacgaggactcggaggacgggccgtgtgtctgtgacttcagctgccagagtgtcccaggcagcccggtgtgcggctcagatggggtcacctacagcaccgagtgtgagctgaagaaggccaggtgtgagtcacagcgagggctctacgtagcggcccagggagcctgccgaggccccaccttcgccccgctgccgcctgtggcccccttacactgtgcccagacgccctacggctgctgccaggacaatatcaccgcagcccggggcgtgggcctggctggctgccccagtgcctgccagtgcaacccccatggctcttacggcggcacctgtgacccagccacaggccagtgctcctgccgcccaggtgtggggggcctcaggtgtgaccgctgtgagcctggcttctggaactttcgaggcatcgtcaccgatggccggagtggctgtacaccctgcagctgtgatccccaaggcgccgtgcgggatgactgtgagcagatgacggggctgtgctcgtgtaagcccggggtggctggacccaagtgtgggcagtgtccagacggccgtgccctgggccccgcgggctgtgaagctgacgcttctgcgcctgcgacctgtgcggagatgcgctgtgagttcggtgcgcggtgcgtggaggagtctggctcagcccactgtgtctgcccgatgctcacctgtccagaggccaacgctaccaaggtctgtgggtcagatggagtcacatacggcaacgagtgtcagctgaagaccatcgcctgccgccagggcctgcaaatctctatccagagcctgggcccgtgccaggaggctgttgctcccagcactcacccgacatctgcctccgtgactgtgaccaccccagggctcctcctgagccaggcactgccggccccccccggcgccctccccctggctcccagcagtaccgcacacagccagaccacccctccgccctcatcacgacctcggaccactgccagcgtccccaggaccaccgtgtggcccgtgctgacggtgccccccacggcaccctcccctgcacccagcctggtggcgtccgcctttggtgaatctggcagcactgatggaagcagcgatgaggaactgagcggggaccaggaggccagtgggggtggctctggggggctcgagcccttggagggcagcagcgtggccacccctgggccacctgtcgagagggcttcctgctacaactccgcgttgggctgctgctctgatgggaagacgccctcgctggacgcagagggctccaactgccccgccaccaaggtgttccagggcgtcctggagctggagggcgtcgagggccaggagctgttctacacgcccgagatggctgaccccaagtcagaactgttcggggagacagccaggagcattgagagcaccctggacgacctcttccggaattcagacgtcaagaaggattttcggagtgtccgcttgcgggacctggggcccggcaaatccgtccgcgccattgtggatgtgcactttgaccccaccacagccttcagggcacccgacgtggcccgggccctgctccggcagatccaggtgtccaggcgccggtccttgggggtgaggcggccgctgcaggagcacgtgcgatttatggactttgactggtttcctgcgtttatcacgggggccacgtcaggagccattgctgcgggagccacggccagagccaccactgcatcgcgcctgccgtcctctgctgtgacccctcgggccccgcaccccagtcacacaagccagcccgttgccaagaccacggcagcccccaccacacgtcggccccccaccactgcccccagccgtgtgcccggacgtcggcccccggccccccagcagcctccaaagccctgtgactcacagccctgcttccacggggggacctgccaggactgggcattgggcgggggcttcacctgcagctgcccggcaggcaggggaggcgccgtctgtgagaaggtgcttggcgcccctgtgccggccttcgagggccgctccttcctggccttccccactctccgcgcctaccacacgctgcgcctggcactggaattccgggcgctggagcctcaggggctgctgctgtacaatggcaacgcccggggcaaggacttcctggcattggcgctgctagatggccgcgtgcagctcaggtttgacacaggttcggggccggcggtgctgaccagtgccgtgccggtagagccgggccagtggcaccgcctggagctgtcccggcactggcgccggggcaccctctcggtggatggtgagacccctgttctgggcgagagtcccagtggcaccgacggcctcaacctggacacagacctctttgtgggcggcgtacccgaggaccaggctgccgtggcgctggagcggaccttcgtgggcgccggcctgagggggtgcatccgtttgctggacgtcaacaaccagcgcctggagcttggcattgggccgggggctgccacccgaggctctggcgtgggcgagtgcggggaccacccctgcctgcccaacccctgccatggcggggccccatgccagaacctggaggctggaaggttccattgccagtgcccgcccggccgcgtcggaccaacctgtgccgatgagaagagcccctgccagcccaacccctgccatggggcggcgccctgccgtgtgctgcccgagggtggtgctcagtgcgagtgccccctggggcgtgagggcaccttctgccagacagcctcggggcaggacggctctgggcccttcctggctgacttcaacggcttctcccacctggagctgagaggcctgcacacctttgcacgggacctgggggagaagatggcgctggaggtcgtgttcctggcacgaggccccagcggcctcctgctctacaacgggcagaagacggacggcaagggggacttcgtgtcgctggcactgcgggaccgccgcctggagttccgctacgacctgggcaagggggcagcggtcatcaggagcagggagccagtcaccctgggagcctggaccagggtctcactggagcgaaacggccgcaagggtgccctgcgtgtgggcgacggcccccgtgtgttgggggagtccccggttccgcacaccgtcctcaacctgaaggagccgctctacgtagggggcgctcccgacttcagcaagctggcccgtgctgctgccgtgtcctctggcttcgacggtgccatccagctggtctccctcggaggccgccagctgctgaccccggagcacgtgctgcggcaggtggacgtcacgtcctttgcaggtcacccctgcacccgggcctcaggccacccctgcctcaatggggcctcctgcgtcccgagggaggctgcctatgtgtgcctgtgtcccgggggattctcaggaccgcactgcgagaaggggctggtggagaagtcagcgggggacgtggataccttggcctttgacgggcggacctttgtcgagtacctcaacgctgtgaccgagagcgagaaggcactgcagagcaaccactttgaactgagcctgcgcactgaggccacgcaggggctggtgctctggagtggcaaggccacggagcgggcagactatgtggcactggccattgtggacgggcacctgcaactgagctacaacctgggctcccagcccgtggtgctgcgttccaccgtgcccgtcaacaccaaccgctggttgcgggtcgtggcacatagggagcagagggaaggttccctgcaggtgggcaatgaggcccctgtgaccggctcctccccgctgggcgccacgcagctggacactgatggagccctgtggcttgggggcctgccggagctgcccgtgggcccagcactgcccaaggcctacggcacaggctttgtgggctgcttgcgggacgtggtggtgggccggcacccgctgcacctgctggaggacgccgtcaccaagccagagctgcggccctgccccaccccatgagctggcaccagagccccgcgcccgctgtaattattttctatttttgtaaacttgttgctttttgatatgattttcttgcctgagtgttggccggagggactgctggcccggcctcccttccgtccaggcagccgtgctgcagacagacctagtgccgagggatggacaggcgaggtggcagcgtggagggctcggcgtggatggcagcctcaggacacacacccctgcctcaaggtgctgagcccccgccttgcactgcgcctgccccacggtgtccccgccgggaagcagccccggctcctgaatcaccctcgctccgtcaggcgggactcgtgtcccagagaggaaggggctgctgaggtctgatggggcccttcctccgggtgaccccacagggcctttccaagcccccatttgagctgctccttcctgtgtgtgctctgggccctgcctcggcctcctgcgccaatactgtgacttccaaacaatgttactgctgggcacagctctgcgttgctcccgtgctgcctgcgccagccccaggctgctgaggagcagaggccagaccagggccgatctgggtgtcctgaccctcagctggccctgcccagccaccctggacgtgaccgtatccctctgccacaccccaggccctgcgaggggctatcgagaggagctcactgtgggatggggttgacctctgccgcctgcctgggtatctgggcctggccatggctgtgttcttcatgtgttgattttatttgacccctggagtggtgggtctcatctttcccatctcgcctgagagcggctgagggctgcctcactgcaaatcctccccacagcgtcagtgaaagtcgtccttgtctcagaatgaccaggggccagccagtgtctgaccaaggtcaaggggcaggtgcagaggtggcagggatggctccgaagccagaaatgccttaaactgcaacgtcccgtcccttccccacccccatcccatccccacccccagccccagcccagtcctcctaggagcaggacccgatgaagcgggcggcggtggggctgggtgccgtgttactaactctagtatgtttctgtgtcaatcgctgtgaaataaagtctgaaaactttaaaagcaaaaaaaaaaaaaaaaaa

SEQ ID NO: 65 - DNA, 829 bp, Homo sapiens
  tumor protein, translationally-controlled 1 transcript variant 2 (TPT1), fortilin, translationally-controlled tumor protein (TCTP), histamine-releasing factor (HRF), p02, p23
  CDS (94)...(612): TPT1
ccccccgagcgccgctccggctgcaccgcgctcgctccgagtttcaggctcgtgctaagctagcgccgtcgtcgtctcccttcagtcgccatcatgattatctaccgggacctcatcagccacgatgagatgttctccgacatctacaagatccgggagatcgcggacgggttgtgcctggaggtggaggggaagatggtcagtaggacagaaggtaacattgatgactcgctcattggtggaaatgcctccgctgaaggccccgagggcgaaggtaccgaaagcacagtaatcactggtgtcgatattgtcatgaaccatcacctgcaggaaacaagtttcacaaaagaagcctacaagaagtacatcaaagattacatgaaatcaatcaaagggaaacttgaagaacagagaccagaaagagtaaaaccttttatgacaggggctgcagaacaaatcaagcacatccttgctaatttcaaaaactaccagttctttattggtgaaaacatgaatccagatggcatggttgctctattggactaccgtgaggatggtgtgaccccatatatgattttctttaaggatggtttagaaatggaaaaatgttaacaaatgtggcaattattttggatctatcacctgtcatcataactggcttctgcttgtcatccacacaacaccaggacttaagacaaatgggactgatgtcatcttgagctcttcatttattttgactgtgatttatttggagtggaggcattgtttttaagaaaaacatgtcatgtaggttgtctaaaaataaaatgcatttaaactcatttgagag

SEQ ID NO: 66 - DNA, 881 bp, Homo sapiens
  60S ribosomal protein L36a transcript variant 1, L36A, ribosomal protein L44, L44, RPL44, L44-like ribosomal protein (L44L), cell growth-inhibiting gene 15 protein, cell migration-inducing gene 6 protein (MIG6)
  CDS (47)...(475): RPL36A
gagtcctctcagccgcccgagggcgctgcgctgagccttacactctatgattgctcctaccgactcccatgaggaagtgcgatcgggaacctcctatatacttccgtttgcctcgcggtttctttctttccgcgccgatagcgctcacgcaagcatggttaacgtccctaaaacccgccggactttctgtaagaagtgtggcaagcaccaaccccataaagtgacacagtacaagaagggcaaggattctctgtacgcccagggaaagcggcgttatgacaggaagcagagtggctatggtgggcaaactaagccgattttccggaaaaaggctaaaactacaaagaagattgtgctaaggcttgagtgcgttgagcccaactgcagatctaagagaatgctggctattaaaagatgcaagcattttgaactgggaggagataagaagagaaagggccaagtgatccagttctaagtgtcatcttttattatgaagacaataaaatcttgagtttatgttcacttcatttgtttgctgttcatcttttgggagggaataagctagagccatcaatacaattccgcttgtggggaaatttatgcctcttactggtactacttgttttgcattgaagctgactggttgagttcacatcatatgttgcaattttctaatttggcacttcaatcactaggggccttatgaggcagtttgtcattatgcaatggttattggttatcatgtgagtagacacatttcaggctaatagggagaagtcagtaacacattcatagtgaatatgagatgtctttgctaagagttaagtgtcagatctttgttataacagttaatttaataaagaattttggcattgttcttc

SEQ ID NO: 67 - DNA, 1351 bp, Homo sapiens
  adenine nucleotide translocator 2 (fibroblast) (ANT2), solute carrier family 25 (mitochondrial carrier, adenine nucleotide translocator) member 5 (SLC25A5), ADP,ATP carrier protein 2 (AAC2), fibroblast isoform, 2F1, T2, T3
  CDS (117)...(1013): SLC25A5
agctccggctccccctatataaatcggccatttgcttcgctccgccccgcagcgccggagtcaaagccggttcccggcccagtcccgtcctgcagcagtctgcctcctctttcaacatgacagatgccgctgtgtccttcgccaaggacttcctggcaggtggagtggccgcagccatctccaagacggcggtagcgcccatcgagcgggtcaagctgctgctgcaggtgcagcatgccagcaagcagatcactgcagataagcaatacaaaggcattatagactgcgtggtccgtattcccaaggagcagggagttctgtccttctggcgcggtaacctggccaatgtcatcagatacttccccacccaggctcttaacttcgccttcaaagataaatacaagcagatcttcctgggtggtgtggacaagagaacccagttttggctctactttgcagggaatctggcatcgggtggtgccgcaggggccacatccctgtgttttgtgtaccctcttgattttgcccgtacccgtctagcagctgatgtgggtaaagctggagctgaaagggaattccgaggcctcggtgactgcctggttaagatctacaaatctgatgggattaagggcctgtaccaaggctttaacgtgtctgtgcagggtattatcatctaccgagccgcctacttcggtatctatgacactgcaaagggaatgcttccggatcccaagaacactcacatcgtcatcagctggatgatcgcacagactgtcactgctgttgccgggttgacttcctatccatttgacactgttcgccgccgcatgatgatgcagtcagggcgcaaaggaactgacatcatgtacacaggcacgcttgactgctggcggaagattgctcgtgatgaaggaggcaaagcttttttcaagggtgcatggtccaatgttctcagaggcatgggtggtgcttttgtgcttgtcttgtatgatgaaatcaagaagtacacataagttatttcctaggatttttccccctgtgaacaggcatgttgtattatataacatatcttgagcattcttgacagactcctggctgtcagtttctcagtggcaactatttactggttgaaaatgggaagcaataatattcatctgaccagttttctcttaaagccatttccatgatgatgatgatgggactcaattgtattttttatttcagtcactcctgataaataacaaatttggagaaataaaaatatctaaaataaattttgtctgcagtatattttcatataaaaatgcatatttgagtgctacattcgaataaatactacctttttagtgaa

SEQ ID NO: 68 - DNA, 2179 bp, Homo sapiens
  transketolase transcript variant 1 (TKT, TK, TKT1), epididymis luminal protein 107 (HEL107), Wernicke-Korsakoff syndrome
  CDS (173)...(2044): TKT
gatccgagccccgcctcctccccctgccccgcctctcccatccccgccccgccccgcccggcgacttaacgcgcccccgccccgcgcccggcctcggcagccgcctgtcgccgcgggagcagccgctatctctgtgtgtccgcgtgtgcgcccggtccccgcctgccgcaccatggagagctaccacaagcctgaccagcagaagctgcaggccttgaaggacacggccaaccgcctacgtatcagctccatccaggccaccactgcggcgggctctggccaccccacgtcatgctgcagcgccgcagagatcatggctgtcctctttttccacaccatgcgctacaagtcccaggacccccggaatccgcacaatgaccgctttgtgctctccaagggccatgcagctcccatcctctacgcggtctgggctgaagctggtttcctggccgaggcggagctgctgaacctgaggaagatcagctccgacttggacgggcacccggtcccgaaacaagctttcaccgacgtggccactggctccctgggccagggcctcggggccgcttgtgggatggcctacaccggcaaatacttcgacaaggccagctaccgagtctattgcttgctgggagacggggagctgtcagagggctctgtatgggaggccatggccttcgccagcatctataagctggacaaccttgtggccattctagacatcaatcgcctgggccagagtgacccggccccactgcagcaccagatggacatctaccagaagcggtgcgaggccttcggttggcatgccatcatcgtggatggacacagcgtggaggagctgtgcaaggcctttggccaggccaagcaccagccaacagccatcattgccaagaccttcaagggccgagggatcacgggggtagaagataaggagtcttggcatgggaagcccctccccaaaaacatggctgagcagatcatccaggagatctacagccagatccagagcaaaaagaagatcctggcaacccctccacaggaggacgcaccctcagtggacattgccaacatccgcatgcccagcctgcccagctacaaagttggggacaagatagccacccgcaaggcctacgggcaggcactggccaagctgggccatgccagtgaccgcatcatcgccctggatggggacaccaaaaattccaccttctcggagatcttcaaaaaggagcacccggaccgcttcatcgagtgctacattgctgagcagaacatggtgagcatcgcggtgggctgtgccacccgcaacaggacggtgcccttctgcagcacttttgcagccttcttcacgcgggcctttgaccagattcgcatggccgccatctccgagagcaacatcaacctctgcggctcccactgcggcgtttccatcggggaagacgggccctcccagatggccctagaagatctggctatgtttcggtcagtccccacatcaactgtcttttacccaagtgatggcgttgctacagagaaggcagtggaactagccgccaatacaaagggtatctgcttcatccggaccagccgcccagaaaatgccatcatctataacaacaatgaggacttccaggtcggacaagccaaggtggtcctgaagagcaaggatgaccaggtgaccgttatcggggctggggtgaccctgcacgaggccttggccgctgccgaactgctgaagaaagaaaagatcaacatccgcgtgctggaccccttcaccatcaagcccctggacagaaaactcattctcgacagcgctcgtgccaccaagggcaggatcctcaccgtggaggaccattattatgaaggtggcattggtgaggctgtgtccagtgcagtagtgggcgagcctggcatcactgtcacccacctggcagttaaccgggtaccaagaagtgggaagccggctgagctgctgaagatgtttggtatcgacagggatgccattgcacaagctgtgaggggcctcatcaccaaggcctagggcgggtatgaagtgtggggcgggggtctatacattcctgagattctgggaaaggtgctcaaagatgtactgagaggaggggtaaatatatgttttgagaaaaatgaattggccctgaaaaaaaaaaaaaaaaaa

SEQ ID NO: 69 - DNA, 2617 bp, Homo sapiens
  lipase maturation factor 2 (LMF2), transmembrane protein 153 (TMEM153), transmembrane protein 112B (TMEM112B)
  CDS (32)...(2155): LMF2
gggccctgctctagcgggccgcgtagcggacatggcgggctcccggctcccgcggcagctcttcctccagggcgtggcggccgtcttcatgtttgctttcgcttccctctacacgcaaatcccaggcctgtatggccccgagggcatcctacctgcaaggaggacgctgcggcctcagggcaaggggcgctggcagcagctgtgggagaccccgacgctgctgtgggaagcgccgagactggggctggacacggcccagggcctggagctgctgagcctgctgggtgcactagtggccctgggagccctgctgctgagcccactgcgccaccctgtcatctacttgctgctttgggccgcctacctgtcagcctgccaggtgggccaggtgttcctttatttccagtgggactccctgctgctagagactggcttcctggccgtgctggtggccccgctgaggccagcctcccaccgcaaggaggccccccagggcaggcaggcaggggccctgccccacgaagacctccccttctggctggtgcgatggctgctgttccgcctcatgttcgcctcaggcgtggtcaagctgaccagccgctgccctgcgtggtgggggctcactgccctcacctaccactacgagacccagtgcctgcccacgcccgccgcctggttcgcacaccacctgccggtctggctgcacaagctcagcgtggtggccaccttcctaattgagatcgctgtgccgcccctgttcttcgcccccattcgacgcctgcgcttggctgctttctactcgcaggtgctgctgcaggtcctgattatcatcaccggcaactacaacttcttcaacctgatgacgctggtgcttaccactgcgctgctggacgaccagcacctggctgctgagcctggccacggcagccgcaagaagacggccacctcctggcccaaggccctgctggccaccctgtcgctgctgctggaactagccgtctacgggcttctggcctatggcactgtgcactactttggcctggaggttgactggcagcagcgcaccatccactccagaaccactttcaccttccaccagttttctcagtggctgaagacactgacgctgcccactgtgtggctgggtgtggcctccctggtctgggagctgctgagtgccctgtggaggtggacccaggtgcggggctggctacggaagctcagtgctgtagtccaactgtcccttgtgggcactgcgaccgtggccttgttcctgattagcctggtgccgtactcctacgtggagcccgggacccacgggcgcctctggaccggggcccaccgcctgtttggtgccgtggagcacctacagctggccaactcctacggcctcttccgccgcatgactgggcttggtggacggcctgaggtggtgctggagggcagttacgacggccaccactggacggagatcgagttcatgtacaagcctgggaacctgagccggccgcccccggttgtggtgccccaccagccacgcctggactggcagatgtggtttgcagccctgggcccacacacgcacagcccgtggttcacaagcctggtcttgcgcctgctgcagggcaaggagccagtgatccgccttgtccagagccaagtggccaggtatcccttccacaagcagccgcccacctacgtccgagcccagcgctacaagtactggttctcccagcctggggagcagggccagtggtggcggcgccagtgggtggaggagttcttcccatccgtgtccctgggggaccccacgctggagacgctgctcaggcagtttggactacaggagaaaagcccacctcgcacccgcagcgccaacagcaccctggcccaggccctccactggactcgctctcagctgtctcccctggaggcccccgccctgctctgggggctcctcatggccgtgggggctgtcagatttgtgcaagccctgctagcaccctgttctctccggtcctccccgctggcaccagtcagcggggagaagcgcaggccagcctcccagaaagactccggagctgcctccgaacaggccaccgcagcccccaacccctgctccagtagttcgaggaccacccggcgaaagaagtagctgtgttctcccagctgcacgtcctgagagggccaggtcgccgggagtgctctggcctccggcaggacaggacccagccactgtgccttagctgaccctgcagggccaggcacaggttggggggctgcccctggggtttgcagggtgctgcattgagggctccaggccccacccccacgccagccatgcccctccccaggactcccactattgcctctgtgattggcccaggaggaaaacacgaccaagctcaagacccttcccctgccctgggctgtgggggtctgagtctagagcccccaaccctaggccccgtgccagaggggaagaggctgactcccaggggaagaggggaagcactgtcatcttccacgtcatcttcacaccagcccatcctgccctttagatctgggcaccaataaaggcgtcttttgtgcttggctgaaaaaaaaaaaaaaaaaa

SEQ ID NO: 70 - DNA, 4499 bp, Homo sapiens
  60S ribosomal protein L13 transcript variant 1, L13, breast basic conserved protein 1 (BBC1), D16S444E, D16S44E, OK/SW-cl.46
  CDS (77)...(712): RPL13
ccagagtgcattgcggggccgcttcctttccgctcggctgttttcctgcgcaggagccgcagggccgtaggcagccatggcgcccagccggaatggcatggtcttgaagccccacttccacaaggactggcagcggcgcgtggccacgtggttcaaccagccggcccgtaagatccgcagacgtaaggcccggcaagccaaggcgcgccgcatcgccccgcgccccgcgtcgggtcccatccggcccatcgtgcgctgccccacggttcggtaccacacgaaggtgcgcgccggccgcggcttcagcctggaggagctcagggtggccggcattcacaagaaggtggcccggaccatcggcatttctgtggatccgaggaggcggaacaagtccacggagtccctgcaggccaacgtgcagcggctgaaggagtaccgctccaaactcatcctcttccccaggaagccctcggcccccaagaagggagacagttctgctgaagaactgaaactggccacccagctgaccggaccggtcatgcccgtccggaacgtctataagaaggagaaagctcgagtcatcactgaggaagagaagaatttcaaagccttcgctagtctccgtatggcccgtgccaacgcccggctcttcggcatacgggcaaaaagagccaaggaagccgcagaacaggatgttgaaaagaaaaaataaagccctcctggggacttggaatcagtcggcagtcatgctgggtctccacgtggtgtgtttcgtgggaacaactgggcctgggatggggcttcactgctgtgacttcctcctgccaggggatttggggctttcttgaaagacagtccaagccctggataatgctttactttctgtgttgaagcactgttggttgtttggttagtgactgatgtaaaacggttttcttgtggggaggttacagaggctgacttcagagtggacttgtgttttttctttttaaagaggcaaggttgggctggtgctcacagctgtaatcccagcactttgaggttggctgggagttcaagaccagcctggccaacatgtcagaactactaaaaataaagaaatcagccatgcttggtgctgcacacttgtagttgcagctcctgggaggcagaggtgagggatcacttaacccaggaggcagaggctgcactgagccaggatcacgccactgcactctagcctgggcaacagtgagactgtctcaaaaaaaaaaaaagagacagggtcttcggcacccaggctggagtacagtgccacaatcatggctcactgcagtcttgaactcatggcctcaagcagtcctccctcagcctcccaagtagaggggtttataggcacgagaccctgcacccaacctagagttgccttttttaagcaaagcagtttctagttaatgtagcatcttggactttggggcgtcattcttaagcttgttgtgcccggtaaccatggtcctcttgctctgattaacccttccttcaatgggcttcttcacccagacaccaaggtatgagatggccctgccaagtgtcggcctctcctgttaaacaaaaacattctaaagccattgttcttgcttcatggacaagaggcagccagagagagtgccagggtgccctggtctgagctggcatccccatgtcttctgtgtccgagggcagcatggtttctcgtgcagtgctcagacacagcctgccctagtcctaccagctcacagcagcacctgctctccttggcagctatggccatgacaaccccagagaagcagcttcagggaccgagtcagattctgttttgtctacatgcctctgccgggtgccggtattgaggcacccagggagctgttactggcgtggaaataggtgatgctgctacctctgctgctgcactcacagccacacttgatacacgatgacaccttgcttgtttggaaacatctaaacatctagtagatgacttgcaggctgttggctaccagtttcctgtctgaggtgtatatgttaacttcgtgatcagtttgtatgtttgggactcttgtcctatgtaaagttaaggtgggccgggtgcagtggctcacgcctgtaatcctaacactgggaggccgaggcgggtggatcacctgatggtgaaacctcatctctactgaaaatacaaaaattagctgagtggtgacacacgcctgtaatcccagctacttggtaggcttgaacccaggaggcagagattgcagtgagccgagctgcaccactgtgctccagcctgggtgacagcgagactcagtctcaaaaaaagttgtacaaggtggatggttggaagcttgagcctaggctcgaatccctctcacgtgagagggcctgaagatttctggtggattccaacctggctgaagactggccgtggggggtgcaggggtctccagcgctctgccctccagcctgcttcctccctgcccacaccgcactaggggaagggcctttcctgctgcctgcggggccgcacctggagtaggtaatgccatgtggtgacgtgaatggagcagaggtctgtgccccatcacaccgccttgctgtttttactgtgggacaaaagcactctgatctgcgtgttccgggggccctcctaccagccgacttgacgggaagtcagggttcaggtatcatctgtgcacctggggcggggtagtctgcactgaacctgccagagtcccctcctcatttcactgaaagtcacagtctccagggctgtgttgctaaccttacgttctctccgtttgcttaatctattaagagccctaacaggagaggatgggctttctctgttgtctggggccctgctgttggccggtgctcttagcaagaggtcatttttctaggttgcgctgggacattgtgagtttggtgagggtcatggatgtgggctgggctgggctgggctgggccgggctgcctgctgcctgctgctcccctacctgaaatgcagctagtgcggctctgcccttcctggggctgaggaaggcttctgcaggatagctggggggctgggcaggtgggtgaggcagcctccctgctgacactcagtccttgtagctggagcaagatctcctgatccaggtacgggcctgtctgctccaagaaagactctgccaccagatgcaaaggggccctttgttttaacttagtccctggggaccgcctgattcagcacctgtcggcccaggataccccgctggtggggacaagtgcctgagtgtgggccgtgcccgagtgtggccatccctgagtggggccgtcctgactaggaagtggcttttcagttgtgatgtgtgggcctgacctagggggcgctgtggaacccgggctggaaccagccctctgtgccaggccgcagacaggttccgccggccctgaggggcagctgccatggcgtgggtcactgggagctgagaggaagggcccccaccgcacctcaggcaaagcggctctgggaacaccttgatttcgtccatgtgagccgtcccagggagggcagccaagctgtgaagcctgagaaactgacctgtgtgccacgagcttgtggtctgctgcccggtggaggaagtgcaggtgcgcccaggctcctcattccgttttgcaggattccttcggggtgtgagcatttcctattcagcctgtcgcccccggggagcacgggctggctctgtggtgcccgtggccttttgtagaagcgttggttttacggcaggttcatctctggggcagcctcccacagtgggtggggctttgccagcagtgcccacgggggtcatggggccaggcgcgctccggcgcctgcagaactgatcggggatagtctcaggaggcgctagtcacgtgccccggtgatcggggatagtctcagaaggcgctagtctcctgccccggtgatcggggatagtctcaggaggcacgagtcgcctgcctcggtgatgcaccgtttctcacaccggctgctctggcccgagctaaaggggaagacgtgtgcggataggagctgcacacaattttcctccatgtattgtttattttgctttttcttttggctagacattaggaatttcagttttcccaagttgtatttttccttttctattttaaaattatcatgcagggctgggtgaggtcgctcacgcctatagtctcaaaactttgggaggctgaggggggaggatggcatgagcccaggagtttaaggctgcagtgagccgagatcgctccactgtcctccagcctgcatgacagagcgagaccctatctcaggaaaaaaaaaaacaaaactattatgcagtagtttcgaccctggaagacgagtgtgcatctttgagttgtaacacgtgtacctcgcccatccaggcgtagtttcatttggaatctggttatcctgtagttgctttgttaaaaatatatgtaattgcaaatcattt

SEQ ID NO: 71 - DNA, 1494 bp, Homo sapiens
  cathepsin H (CTSH), pro-cathepsin H preproprotein, cathepsin B3, cathepsin BA, N-benzoylarginine-beta-naphthylamide hydrolase, aleurain, ACC-4, ACC-5, CPSB
  CDS (98)...(1105): CTSH
ccacgctcgtgccgctccccccccgcgctcccagttgacgctctgggccgccacctccgcggaccctgagcgcaagagccaagccgccagcgctgcgatgtgggccacgctgccgctgctctgcgccggggcctggctcctgggagtccccgtctgcggtgccgccgaactgtgcgtgaactccttagagaagtttcacttcaagtcatggatgtctaagcaccgtaagacctacagtacggaggagtaccaccacaggctgcagacgtttgccagcaactggaggaagataaacgcccacaacaatgggaaccacacatttaaaatggcactgaaccaattttcagacatgagctttgctgaaataaaacacaagtatctctggtcagagcctcagaattgctcagccaccaaaagtaactaccttcgaggtactggtccctacccaccttccgtggactggcggaaaaaaggaaattttgtctcacctgtgaaaaatcagggtgcctgcggcagttgctggactttctccaccactggggccctggagtctgcgatcgccatcgcaaccggaaagatgctgtccttggcggaacagcagctggtggactgcgcccaggacttcaataatcacggctgccaagggggtctccccagccaggctttcgagtatatcctgtacaacaaggggatcatgggtgaagacacctacccctaccagggcaaggatggttattgcaagttccaacctggaaaggccatcggctttgtcaaggatgtagccaacatcacaatctatgacgaggaagcgatggtggaggctgtggccctctacaaccctgtgagctttgcctttgaggtgactcaggacttcatgatgtatagaacgggcatctactccagtacttcctgccataaaactccagataaagtaaaccatgcagtactggctgttgggtatggagaaaaaaatgggatcccttactggatcgtgaaaaactcttggggtccccagtggggaatgaacgggtacttcctcatcgagcgcggaaagaacatgtgtggcctggctgcctgcgcctcctaccccatccctctggtgtgagccgtggcagccgcagcgcagactggcggagaaggagaggaacgggcagcctgggcctgggtggaaatcctgccctggaggaagttgtggggagatccactgggacccccaacattctgccctcacctctgtgcccagcctggaaacctacagacaaggaggagttccaccatgagctcacccgtgtctatgacgcaaagatcaccagccatgtgccttagtgtccttcttaacagactcaaaccacatggaccacgaatattctttctgtccagaagggctactttccacatatagagctccagggactgtcttttctgtattcgctgttcaataaacattgagtgagcacctccccagatggagcatgctggtcctggaaaaaaaaa

SEQ ID NO: 72 - DNA, 5604 bp, Homo sapiens
  family with sequence similarity 83, member H, FAM83H variant 1 (FAM83H), AI3
  CDS (70)...(3609): FAM83H
gggcggcggtcggctcctgctgcccctgtgccgagaccccgcgcacctggccaggcccctggccccaacatggcccgtcgctctcagagctcctcgcagggggacaacccactggcacccgggtacctgccgcctcactacaaagagtactaccgcctggcggtggatgcactggccgagggtggctcggaggcctacagccgcttcctcgctaccgagggggcaccagacttcctgtgccctgaagagctggaacatgtgagccgacaccttcggcctccgcagtatgttacccgagagccacctgaaggcagccttctcgacgtggacatggatggctcctcgggtacatactggccagtgaactcagaccaggccgtgcctgagcttgatttgggctggcctctgaccttcggcttccagggcaccgaggtgaccaccttggtgcagccaccgccccccgacagccccagtatcaaggatgaggcccgcaggatgatccgttccgcccagcaggtggtggccgtggtgatggacatgttcactgatgtggacctgctcagcgaagtgctggaggccgcggcccgtcgggtcccagtctacatcctgctggatgagatgaacgcgcagcacttcctggacatggccgacaagtgccgtgtcaacctgcaccacgtggatttcctgcgcgtacggactgtggcgggccccacctactactgccgcactgggaagtccttcaagggccacgtcaaggagaagttcctgctggtggactgtgccgtggtgatgagtgggagctacagcttcatgtggtcctttgagaagatccaccgcagcctggcgcacgtgttccaaggagagctggtctccagcttcgacgaggagttccgcatcctcttcgcgcagtccgagccgcttgtgccctcggccgcggccctggcccgcatggacgcctatgccctggctccgtatgccggggccgggcctctcgtgggcgtccctggggtcggggcgccaacccccttctccttccctaaacgagcgcacctcctgttcccgccaccccgggaagagggcctgggcttcccctccttcctcgacccggaccgccacttcctgtcggccttccgccgggaggagccgccgcggatgccggggggcgcgctggaaccgcacgcggggctgcggccgctctcgcggcgcctggaggccgaggccgggccggctggggagctcgcgggcgcgcggggcttcttccaggcgcggcacctggagatggacgccttcaagcggcacagcttcgcgaccgagggcgcgggcgccgtggagaacttcgcggccgcgcggcaggtgtcgcggcagacgttcctcagccacggcgacgacttccgcttccagaccagccacttccaccgtgaccagctctaccagcagcagtaccagtgggacccgcagctcacgccggcgcgcccgcaaggcctgttcgagaagcttcgcgggggccgcgcgggtttcgcggacccggatgacttcaccctgggcgccgggccccgcttcccggagctcggacccgacgggcaccagcggctggactacgtgccgtccagcgcgtcccgcgaggtgcgccacggctcggaccccgccttcgcgcccggaccccgcggcctggagcccagcggagccccgcgccccaacctgacccagcgcttcccatgccaggccgcggcgaggccgggcccagaccccgctcccgaggcggagccggagcgcaggggcgggcccgaggggcgggcagggctgcggcgctggcgtttggcctcctacttgagcggctgccacggcgaggatgggggcgacgacggcctaccggcgcccatggaagcggaggcttacgaagacgacgtgctggctcccgggggccgggcacctgccggcgacctgctcccctcggccttccgcgtcccagcagccttccccaccaaggtcccggtgccaggcccgggcagcggcggcaacggcccagagcgcgagggcccggaggagcctggcctggccaagcaggactcattccgctcgcgcctgaaccccctggtccagcgcagctccaggctgcgctcctcgctcatcttcagcacgtcacaggccgagggcgcggccggggctgcggcggccactgagaaggtgcagctgctgcacaaggagcagacggtcagcgagacgctggggcccggcggagaggccgtgcgctccgcggcttccaccaaggtggcggagctgctggagaagtacaagggcccagcccgtgatcccggcggcggcgcgggcgccatcaccgttgccagccacagcaaggccgtcgtgtcccaggcgtggcgggaagaggtggcggccccaggtgccgtggggggcgagcgccgcagcctcgagagctgcctgctggacctgcgcgactcctttgcacagcagctgcaccaggaggcggagcggcagccgggagccgcgtcgctcaccgcggcgcagctgctcgacacactgggccggagcggctccgaccgcctgccttcccgcttcctctctgcccagagccactcaacgtccccgcaagggctggacagccctctgccgctggaagggtccggagcgcaccaggtgctccataatgagtcaaaagggagccccacctcggcttaccctgagcggaaggggagccccacgcctgggttttccactcgaagaggaagtccaactacaggatttatcgagcagaaggggagccccacctcagcctaccccgagcgcaggggtagtccggtgccccccgtgccggagcgcaggagcagtccggtgccccccgtgccggagcgcaggggcagcctcacccttaccatctccggggagtccccgaaggccgggcccgcggaggaggggccgagcggccccatggaagtcctgcgcaaaggctccttgcgtcttaggcagctgctgagccccaagggcgagcggcgcatggaggatgagggtggcttcccagtgccgcaggagaacggccaacccgagagcccgcggcgtctgtcactgggccagggtgacagcacggaggctgccacagaagagcggggtccgcgggcgcgcctgtcctcagccacggccaacgccttgtacagcagcaaccttcgggatgacacgaaggccattctggagcagatcagtgcccacggccagaagcaccgtgcggtccctgccccgagccccggcccgacccacaacagccccgagctaggccgtccaccggctgctggcgtcctggccccagatatgtccgacaaggacaagtgttcagccatcttccgctcggacagcttggggacccagggccggctgagccgcacgctgccagccagcgcggaggagcgcgatcggctgctgcgccgcatggagagcatgcgcaaggagaagcgcgtgtacagccgcttcgaggtcttctgcaagaaagaggaggccagcagccctggggcaggggaaggccccgcggaggagggcaccagggacagcaaggtgggcaagttcgtgcccaagatcctgggcacgttcaaaagcaagaagtgagtcttctggcctggcaacccaggccagggtgcccgcatcgctgccccggtcatccagaagccccgcggaacagagagccctgctcatgtgcttgagcagcggctgtcaggccacggccgcttggggcttggctgagtgcgccagacctcggctccactggaggctcacctggcagctgccgtctctgccccctggcctccccaacgctggggctgcacccctcgccaccagtgcctttctcccctcagcaccttcatctctgcaccgtcagccttgcgtggcgcagcgtctggctccgccatctctttgtgcctcagtcccccccgccccctttatttttttgagacctagggctggagtgcagttgagcggtctgggctcactgcaacctctgcctcccgggttccagcgattctcctgcctcagcctcctgagtagctgggattacagatgtatgctaccacgcccaggtagtttttgtatttttagtagagacagggtttcactatgttggccaggctggtctccaactcctggcctcaaatgatcagcccgcttcagcctcccaaagtggggggattacaggcgtgagccttgcaccccgctaagtcccctatcctcttgcaagggtctcgcctctgtgcctcaattcctcattctctgggcccttctcctcctcagggcctcctgttctcagggcctcccccctccccgctccctccctctctcaaggtctcctccttccctcccccccccgtctcccccctcccccgcctgggcttcacttcctttcctacttggattctcctgctcgctgcctcccagcatcttttttggaggcccgtctcttgctgtggggaagactgggctggctgcgggcagtttgcaaggggtgggtggggcgggggggggagctggaccagaagatgccccttggagtggcaaggaagctggacagggcaggcctctggggacgggacacagggaagcccgaaggggcgccttggccaggtctgccatctcctccagcgaggctctggccagcactgggtgagagtggggagggggcactggcctttgcagcacagtaaaacatggtccagacaacctgtggccccggcctcatgagcaccccctgcacaggcccggcccaagccaggcgctagaagggctggttgtggagtgcttatccttgacaggtatggggccaggtgagggcaggggacaaggtgcagctgaggccgagcccaactaggtcctgggcacccctgcaggtgggagtggtccttgtcctcctggtatccagcagacacccccctctccccaccagccccattctcaggtcctttcctctttgtcaccaacaccaagaatctgtccagggttcttggcttatcttttatctcttttcactcctagagaggaattgcaattgactcagaatgacacattttggcaccacgtgtgtagaaagcccccactgttagatgatagcctcgtgaaattcatgtttctgtattctcctatttcttttcaaaaactaattttttttttagtgtaataaatcctaagagggaactgatttaagaaacaaggccgccaaacaaaggcagcagttccgactccagcagctgggaaaggaaggaaagtgaccccactttcactcctgcacagcccactggttaccaaaaccaccgtgcaagtcgggatgacagcagggacttctggccaggtgggaaaggtgcctggaagcgggatgcgcctgtgcgtctcttggccatgatgttcttgtgggcatgttattcttggtgctgcctggggtgttgctgagcggacaggctctccagctggagtccatggagaggccagaggctggcggccctgcctgggccttcggagcctcctgcctgcaccctccacctcttctaaaccatgatgtggcacattttggtgttaataaaacacaacacacaaagtaaaaaaaaaaaaaaaaaa

SEQ ID NO: 73 - DNA, 735 bp, Homo sapiens
  40S ribosomal protein S29 transcript variant 2, S29
  CDS (31)...(234): RPS29
cttttacctcgttgcactgctgagagcaagatgggtcaccagcagctgtactggagccacccgcgaaaattcggccagggttctcgctcttgtcgtgtctgttcaaaccggcacggtctgatccggaaatatggcctcaatatgtgccgccagtgtttccgtcagtacgcgaaggatatcggtttcattaagaaagacctgagctgtcttccttggcactgcctatggaggtgacacccatctcctccatcatggccatcctgagaccgctcgcgaagcccaagatcatcaaaaagagcaccaagttcactgggaaccagtcagactgatatgtcaaaattaagggtaactggtggaaacacagaggtattaacaacagggttcatagaaggtttgagggccagatctatgcccaacattggttatgggagaaacaaaaagacaaagcacatactgcccagtggcttctggaagttcctggtccacaacgttaaggagctggaagtactgctggtgagcaacaaatcttactgtgttgagatcactcatgatgtttcttccaagaactgcaaagccatcttggaaagagcagcccaggtggtcatcagagtcaccaatgccaatgccagcctgcacagtgcagaaagtgaatagacagtgaatgtgtttgttttattggggtttaaataaaaccaataaaactgtaaaaacaaaaacaacaaaaaaaaaaaaaaa

SEQ ID NO: 74 - DNA, 594 bp, Homo sapiens
  60S ribosomal protein L23, L23, ribosomal protein L17, rpL17
  CDS (91)...(513): RPL23
ggccacgtgaggagggtgggcggggcgttaaagttcatatcccagtgtcctttgaatcgacttccttttttcttttttccggcgttcaagatgtcgaagcgaggacgtggtgggtcctctggtgcgaaattccggatttccttgggtcttccggtaggagctgtaatcaattgtgctgacaacacaggagccaaaaacctgtatatcatctccgtgaaggggatcaagggacggctgaacagacttcccgctgctggtgtgggtgacatggtgatggccacagtcaagaaaggcaaaccagagctcagaaaaaaggtacatccagcagtggtcattcgacaacgaaagtcataccgtagaaaagatggcgtgtttctttattttgaagataatgcaggagtcatagtgaacaataaaggcgagatgaaaggttctgccattacaggaccagtagcaaaggagtgtgcagacttgtggccccggattgcatccaatgctggcagcattgcatgattctccagtatatttgtaaaaaataaaaaaaaaaactaaacccattaaaaagtatttgtttgcaaaaaaaaaaaaaaaaaa

SEQ ID NO: 75 - DNA, 514 bp, Homo sapiens
  40S ribosomal protein S25, S25
  CDS (64)...(441): RPS25
cttcctttttgtccgacatcttgacgaggctgcggtgtctgctgctattctccgagcttcgcaatgccgcctaaggacgacaagaagaagaaggacgctggaaagtcggccaagaaagacaaagacccagtgaacaaatccgggggcaaggccaaaaagaagaagtggtccaaaggcaaagttcgggacaagctcaataacttagtcttgtttgacaaagctacctatgataaactctgtaaggaagttcccaactataaacttataaccccagctgtggtctctgagagactgaagattcgaggctccctggccagggcagcccttcaggagctccttagtaaaggacttatcaaactggtttcaaagcacagagctcaagtaatttacaccagaaataccaagggtggagatgctccagctgctggtgaagatgcatgaataggtccaaccagctgtacatttggaaaaataaaactttattaaatcaaaaaaaaaaaaaaaaaaaaaaaaa

SEQ ID NO: 76 - DNA, 1794 bp, Homo sapiens
  tubulin, beta 3 class III transcript variant 1 (TUBB3), class III beta-tubulin, tubulin beta-4 chain (TUBB4), beta-4, CDCBM, CDCBM1, CFEOM3A
  CDS (124)...(1476): TUBB3
gacatcagccgatgcgaagggcggggccgcggctataagagcgcgcggccgcggtccccgaccctcagcagccagcccggcccgcccgcgcccgtccgcagccgcccgccagacgcgcccagtatgagggagatcgtgcacatccaggccggccagtgcggcaaccagatcggggccaagttctgggaagtcatcagtgatgagcatggcatcgaccccagcggcaactacgtgggcgactcggacttgcagctggagcggatcagcgtctactacaacgaggcctcttctcacaagtacgtgcctcgagccattctggtggacctggaacccggaaccatggacagtgtccgctcaggggcctttggacatctcttcaggcctgacaatttcatctttggtcagagtggggccggcaacaactgggccaagggtcactacacggagggggcggagctggtggattcggtcctggatgtggtgcggaaggagtgtgaaaactgcgactgcctgcagggcttccagctgacccactcgctggggggcggcacgggctccggcatgggcacgttgctcatcagcaaggtgcgtgaggagtatcccgaccgcatcatgaacaccttcagcgtcgtgccctcacccaaggtgtcagacacggtggtggagccctacaacgccacgctgtccatccaccagctggtggagaacacggatgagacctactgcatcgacaacgaggcgctctacgacatctgcttccgcaccctcaagctggccacgcccacctacggggacctcaaccacctggtatcggccaccatgagcggagtcaccacctccttgcgcttcccgggccagctcaacgctgacctgcgcaagctggccgtcaacatggtgcccttcccgcgcctgcacttcttcatgcccggcttcgcccccctcacagcccggggcagccagcagtaccgggccctgaccgtgcccgagctcacccagcagatgttcgatgccaagaacatgatggccgcctgcgacccgcgccacggccgctacctgacggtggccaccgtgttccggggccgcatgtccatgaaggaggtggacgagcagatgctggccatccagagcaagaacagcagctacttcgtggagtggatccccaacaacgtgaaggtggccgtgtgtgacatcccgccccgcggcctcaagatgtcctccaccttcatcgggaacagcacggccatccaggagctgttcaagcgcatctccgagcagttcacggccatgttccggcgcaaggccttcctgcactggtacacgggcgagggcatggacgagatggagttcaccgaggccgagagcaacatgaacgacctggtgtccgagtaccagcagtaccaggacgccacggccgaggaagagggcgagatgtacgaagacgacgaggaggagtcggaggcccagggccccaagtgaagctgctcgcagctggagtgagaggcaggtggcggccggggccgaagccagcagtgtctaaacccccggagccatcttgctgccgacaccctgctttcccctcgccctagggctcccttgccgccctcctgcagtatttatggcctcgtcctccccacctaggccacgtgtgagctgctcctgtctctgtcttattgcagctccaggcctgacgttttacggttttgttttttactggtttgtgtttatattttcggggatacttaataaatctattgctgtcagatacccttaaaaaaaaaaaaaaaaaaaaaaaaa

SEQ ID NO: 77 - DNA, 660 bp, Homo sapiens
  40S ribosomal protein S10 transcript variant 2, S10, DBA9
  CDS (95)...(592): RPS10
ggcggggggcgggtccacgccagcccggaagagacgcagcaccgcgcatgctccttcctttccagccccggtaccggaccctgcagccgcagagatgttgatgcctaagaagaaccggattgccatttatgaactcctttttaaggagggagtcatggtggccaagaaggatgtccacatgcctaagcacccggagctggcagacaagaatgtgcccaaccttcatgtcatgaaggccatgcagtctctcaagtcccgaggctacgtgaaggaacagtttgcctggagacatttctactggtaccttaccaatgagggtatccagtatctccgtgattaccttcatctgcccccggagattgtgcctgccaccctacgccgtagccgtccagagactggcaggcctcggcctaaaggtctggagggtgagcgacctgcgagactcacaagaggggaagctgacagagatacctacagacggagtgctgtgccacctggtgccgacaagaaagccgaggctggggctgggtcagcaaccgaattccagtttagaggcggatttggtcgtggacgtggtcagccacctcagtaaaattggagaggattcttttgcattgaataaacttacagccaaaaaaccttaaaaaaaaaaaaaaaaaa

SEQ ID NO: 78 - DNA, 8481 bp, Homo sapiens
  fatty acid synthase (FASN, FAS), short chain dehydrogenase/reductase family 27X, member 1 (SDR27X1), OA-519
  CDS (118)...(7653): FASN
gagagacggcagcggccccggcctccctctccgccgcgcttcagcctcccgctccgccgcgctccagcctcgctctccgccgcccgcaccgccgcccgcgccctcaccagagcagccatggaggaggtggtgattgccggcatgtccgggaagctgccagagtcggagaacttgcaggagttctgggacaacctcatcggcggtgtggacatggtcacggacgatgaccgtcgctggaaggcggggctctacggcctgccccggcggtccggcaagctgaaggacctgtctaggtttgatgcctccttcttcggagtccaccccaagcaggcacacacgatggaccctcagctgcggctgctgctggaagtcacctatgaagccatcgtggacggaggcatcaacccagattcactccgaggaacacacactggcgtctgggtgggcgtgagcggctctgagacctcggaggccctgagccgagaccccgagacactcgtgggctacagcatggtgggctgccagcgagcgatgatggccaaccggctctccttcttcttcgacttcagagggcccagcatcgcactggacacagcctgctcctccagcctgatggccctgcagaacgcctaccaggccatccacagcgggcagtgccctgccgccatcgtggggggcatcaatgtcctgctgaagcccaacacctccgtgcagttcttgaggctggggatgctcagccccgagggcacctgcaaggccttcgacacagcggggaatgggtactgccgctcggagggtgtggtggccgtcctgctgaccaagaagtccctggcccggcgggtgtacgccaccatcctgaacgccggcaccaatacagatggcttcaaggagcaaggcgtgaccttcccctcaggggatatccaggagcagctcatccgctcgttgtaccagtcggccggagtggcccctgagtcatttgaatacatcgaagcccacggcacaggcaccaaggtgggcgacccccaggagctgaatggcatcacccgagccctgtgcgccacccgccaggagccgctgctcatcggctccaccaagtccaacatggggcacccggagccagcctcggggctggcagccctggccaaggtgctgctgtccctggagcacgggctctgggcccccaacctgcacttccatagccccaaccctgagatcccagcgctgttggatgggcggctgcaggtggtggaccagcccctgcccgtccgtggcggcaacgtgggcatcaactcctttggcttcgggggctccaacgtgcacatcatcctgaggcccaacacgcagccgccccccgcacccgccccacatgccaccctgccccgtctgctgcgggccagcggacgcacccctgaggccgtgcagaagctgctggagcagggcctccggcacagccaggacctggctttcctgagcatgctgaacgacatcgcggctgtccccgccaccgccatgcccttccgtggctacgctgtgctgggtggtgagcgcggtggcccagaggtgcagcaggtgcccgctggcgagcgcccgctctggttcatctgctctgggatgggcacacagtggcgcgggatggggctgagcctcatgcgcctggaccgcttccgagattccatcctacgctccgatgaggctgtgaagccattcggcctgaaggtgtcacagctgctgctgagcacagacgagagcacctttgatgacatcgtccattcgtttgtgagcctgactgccatccagataggcctcatagacctgctgagctgcatggggctgaggccagatggcatcgtcggccactccctgggggaggtggcctgtggctacgccgacggctgcctgtcccaggaggaggccgtcctcgctgcctactggaggggacagtgcatcaaagaagcccatctcccgccgggcgccatggcagccgtgggcttgtcctgggaggagtgtaaacagcgctgccccccgggcgtggtgcccgcctgccacaactccaaggacacagtcaccatctcgggacctcaggccccggtgtttgagttcgtggagcagctgaggaaggagggtgtgtttgccaaggaggtgcggaccggcggtatggccttccactcctacttcatggaggccatcgcacccccactgctgcaggagctcaagaaggtgatccgggagccgaagccacgttcagcccgctggctcagcacctctatccccgaggcccagtggcacagcagcctggcacgcacgtcctccgccgagtacaatgtcaacaacctggtgagccctgtgctgttccaggaggccctgtggcacgtgcctgagcacgcggtggtgctggagatcgcgccccacgccctgctgcaggctgtcctgaagcgtggcctgaagccgagctgcaccatcatccccctgatgaagaaggatcacagggacaacctggagttcttcctggccggcatcggcaggctgcacctctcaggcatcgacgccaaccccaatgccttgttcccacctgtggagttcccagctccccgaggaactcccctcatctccccactcatcaagtgggaccacagcctggcctgggacgtgccggccgccgaggacttccccaacggttcaggttccccctcagccgccatctacaacatcgacaccagctccgagtctcctgaccactacctggtggaccacaccctcgacggtcgcgtcctcttccccgccactggctacctgagcatagtgtggaagacgctggcccgcgccctgggcctgggcgtcgagcagctgcctgtggtgtttgaggatgtggtgctgcaccaggccaccatcctgcccaagactgggacagtgtccctggaggtacggctcctggaggcctcccgtgccttcgaggtgtcagagaacggcaacctggtagtgagtgggaaggtgtaccagtgggatgaccctgaccccaggctcttcgaccacccggaaagccccacccccaaccccacggagcccctcttcctggcccaggctgaagtttacaaggagctgcgtctgcgtggctacgactacggccctcatttccagggcatcctggaggccagcctggaaggtgactcggggaggctgctgtggaaggataactgggtgagcttcatggacaccatgctgcagatgtccatcctgggctcggccaagcacggcctgtacctgcccacccgtgtcaccgccatccacatcgaccctgccacccacaggcagaagctgtacacactgcaggacaaggcccaagtggctgacgtggtggtgagcaggtggctgagggtcacagtggccggaggcgtccacatctccgggctccacactgagtcggccccgcggcggcagcaggagcagcaggtgcccatcctggagaagttttgcttcactccccacacggaggaggggtgcctgtctgagcgcgctgccctgcaggaggagctgcaactgtgcaaggggctggtgcaggcactgcagaccaaggtgacccagcaggggctgaagatggtggtgcccggactggatggggcccagatcccccgggacccctcacagcaggaactgccccggctgttgtcggctgcctgcaggcttcagctcaacgggaacctgcagctggagctggcgcaggtgctggcccaggagaggcccaagctgccagaggaccctctgctcagcggcctcctggactccccggcactcaaggcctgcctggacactgccgtggagaacatgcccagcctgaagatgaaggtggtggaggtgctggctggccacggtcacctgtattcccgcatcccaggcctgctcagcccccatcccctgctgcagctgagctacacggccaccgaccgccacccccaggccctggaggctgcccaggccgagctgcagcagcacgacgttgcccagggccagtgggatcccgcagaccctgcccccagcgccctgggcagcgccgacctcctggtgtgcaactgtgctgtggctgccctcggggacccggcctcagctctcagcaacatggtggctgccctgagagaagggggctttctgctcctgcacacactgctccgggggcaccccctcggggacatcgtggccttcctcacctccactgagccgcagtatggccagggcatcctgagccaggacgcgtgggagagcctcttctccagggtgtcgctgcgcctggtgggcctgaagaagtccttctacggctccacgctcttcctgtgccgccggcccaccccgcaggacagccccatcttcctgccggtggacgataccagcttccgctgggtggagtctctgaagggcatcctggctgacgaagactcttcccggcctgtgtggctgaaggccatcaactgtgccacctcgggcgtggtgggcttggtgaactgtctccgccgagagcccggcgggaaccgcctccggtgtgtgctgctctccaacctcagcagcacctcccacgtcccggaggtggacccgggctccgcagaactgcagaaggtgttgcagggagacctggtgatgaacgtctaccgcgacggggcctggggggctttccgccacttcctgctggaggaggacaagcctgaggagccgacggcacatgcctttgtgagcaccctcacccggggggacctgtcctccatccgctgggtctgctcctcgctgcgccatgcccagcccacctgccctggcgcccagctctgcacggtctactacgcctccctcaacttccgcgacatcatgctggccactggcaagctgtcccctgatgccatcccagggaagtggacctcccaggacagcctgctaggtatggagttctcgggccgagacgccagcggcaagcgtgtgatgggactggtgcctgccaagggcctggccacctctgtcctgctgtcaccggacttcctctgggatgtgccttccaactggacgctggaggaggcggcctcggtgcctgtcgtctacagcacggcctactacgcgctggtggtgcgtgggcgggtgcgccccggggagacgctgctcatccactcgggctcgggcggcgtgggccaggccgccatcgccatcgccctcagtctgggctgccgcgtcttcaccaccgtggggtcggctgagaagcgggcgtacctccaggccaggttcccccagctcgacagcaccagcttcgccaactcccgggacacatccttcgagcagcatgtgctgtggcacacgggcgggaagggcgttgacctggtcttgaactccttggcggaagagaagctgcaggccagcgtgaggtgcttggctacgcacggtcgcttcctggaaattggcaaattcgacctttctcagaaccacccgctcggcatggctatcttcctgaagaacgtgacattccacggggtcctactggatgcgttcttcaacgagagcagtgctgactggcgggaggtgtgggcgcttgtgcaggccggcatccgggatggggtggtacggcccctcaagtgcacggtgttccatggggcccaggtggaggacgccttccgctacatggcccaagggaagcacattggcaaagtcgtcgtgcaggtgcttgcggaggagccggaggcagtgctgaagggggccaaacccaagctgatgtcggccatctccaagaccttctgcccggcccacaagagctacatcatcgctggtggtctgggtggcttcggcctggagttggcgcagtggctgatacagcgtggggtgcagaagctcgtgttgacttctcgctccgggatccggacaggctaccaggccaagcaggtccgccggtggaggcgccagggcgtacaggtgcaggtgtccaccagcaacatcagctcactggagggggcccggggcctcattgccgaggcggcgcagcttgggcccgtgggcggcgtcttcaacctggccgtggtcttgagagatggcttgctggagaaccagaccccagagttcttccaggacgtctgcaagcccaagtacagcggcaccctgaacctggacagggtgacccgagaggcgtgccctgagctggactactttgtggtcttctcctctgtgagctgcgggcgtggcaatgcgggacagagcaactacggctttgccaattccgccatggagcgtatctgtgagaaacgccggcacgaaggcctcccaggcctggccgtgcagtggggcgccatcggcgacgtgggcattttggtggagacgatgagcaccaacgacacgatcgtcagtggcacgctgccccagcgcatggcgtcctgcctggaggtgctggacctcttcctgaaccagccccacatggtcctgagcagctttgtgctggctgagaaggctgcggcctatagggacagggacagccagcgggacctggtggaggccgtggcacacatcctgggcatccgcgacttggctgctgtcaacctggacagctcactggcggacctgggcctggactcgctcatgagcgtggaggtgcgccagacgctggagcgtgagctcaacctggtgctgtccgtgcgcgaggtgcggcaactcacgctccggaaactgcaggagctgtcctcaaaggcggatgaggccagcgagctggcatgccccacgcccaaggaggatggtctggcccagcagcagactcagctgaacctgcgctccctgctggtgaacccggagggccccaccctgatgcggctcaactccgtgcagagctcggagcggcccctgttcctggtgcacccaatcgagggctccaccaccgtgttccacagcctggcctcccggctcagcatccccacctatggcctgcagtgcacccgagctgcgccccttgacagcatccacagcctggctgcctactacatcgactgcatcaggcaggtgcagcccgagggcccctaccgcgtggccggctactcctacggggcctgcgtggcctttgaaatgtgctcccagctgcaggcccagcagagcccagcccccacccacaacagcctcttcctgttcgacggctcgcccacctacgtactggcctacacccagagctaccgggcaaagctgaccccaggctgtgaggctgaggctgagacggaggccatatgcttcttcgtgcagcagttcacggacatggagcacaacagggtgctggaggcgctgctgccgctgaagggcctagaggagcgtgtggcagccgccgtggacctgatcatcaagagccaccagggcctggaccgccaggagctgagctttgcggcccggtccttctactacaagctgcgtgccgctgagcagtacacacccaaggccaagtaccatggcaacgtgatgctactgcgcgccaagacgggtggcgcctacggcgaggacctgggcgcggactacaacctctcccaggtatgcgacgggaaagtatccgtccacgtcatcgagggtgaccaccgcacgctgctggagggcagcggcctggagtccatcatcagcatcatccacagctccctggctgagccacgcgtgagcgtgcgggagggctaggcccgtgcccccgcctgccaccggaggtcactccaccatccccaccccaccccaccccacccccgccatgcaacgggattgaagggtcctgccggtgggaccctgtccggcccagtgccactgccccccgaggctgctagatgtaggtgttaggcatgtcccacccacccgccgcctcccacggcacctcggggacaccagagctgccgacttggagactcctggtctgtgaagagccggtggtgcccgtgcccgcaggaactgggctgggcctcgtgcgcccgtggggtctgcgcttggtctttctgtgcttggatttgcatatttattgcattgctggtagagacccccaggcctgtccaccctgccaagactcctcaggcagcgtgtgggtcccgcactctgcccccatttccccgatgtcccctgcgggcgcgggcagccacccaagcctgctggctgcggccccctctcggccaggcattggctcagcccgctgagtggggggtcgtgggccagtccccgaggagctgggcccctgcacaggcacacagggcccggccacacccagcggccccccgcacagccacccgtggggtgctgcccttatgcccggcgccgggcaccaactccatgtttggtgtttgtctgtgtttgtttttcaagaaatgattcaaattgctgcttggattttgaaatttactgtaactgtcagtgtacacgtctggaccccgtttcatttttacaccaatttggtaaaaatgctgctctcagcctcccacaattaaaccgcatgtgatctccaaaaaaaaaaaaaaaaaaaaaaaa

SEQ ID NO: 79 - DNA, 985 bp, Homo sapiens
  60S ribosomal protein L17 transcript variant 1, L17, ribosomal protein L23, RPL23, gene encoding putative NFkB activating protein, PD-1
  CDS (371)...(925): RPL17
cctgcctcctcagatctcgtttcttcggctacgaatctcgcgagaagtcaagttctcatgagttctcccaaaatccaccgctcttcctctttccctaagcagcctgagggttgactggattggtgaggcccgtgtggctacttctgtggaagcagtgctgtagttactggaagataaaagggaaagcaagcccttggtgggggaaagtatggctgcgatgatggcatttcttaggacacctttggattaataatgaaaacaactactctctgagcagctgttcgaatcatctgatatttatactgaatgagttactgtaagtacgtattgacagaattacactgtactttcctctaggtgatctgtgaaaatggttcgctattcacttgacccggagaaccccacgaaatcatgcaaatcaagaggttccaatcttcgtgttcactttaagaacactcgtgaaactgctcaggccatcaagggtatgcatatacgaaaagccacgaagtatctgaaagatgtcactttacagaaacagtgtgtaccattccgacgttacaatggtggagttggcaggtgtgcgcaggccaagcaatggggctggacacaaggtcggtggcccaaaaagagtgctgaatttttgctgcacatgcttaaaaacgcagagagtaatgctgaacttaagggtttagatgtagattctctggtcattgagcatatccaagtgaacaaagcacctaagatgcgccgccggacctacagagctcatggtcggattaacccatacatgagctctccctgccacattgagatgatccttacggaaaaggaacagattgttcctaaaccagaagaggaggttgcccagaagaaaaagatatcccagaagaaactgaagaaacaaaaacttatggcacgggagtaaattcagcattaaaataaatgtaattaaaaggaaaagaaaaaaaaaaaaaaaaaaaaaaaa

SEQ ID NO: 80 - DNA, 3486 bp, Homo sapiens
  eukaryotic translation initiation factor 2, subunit 3 gamma, 52kDa (EIF2S3, eIF-2gA, EIF2gamma), eukaryotic translation initiation factor 2G (EIF2G), eukaryotic translation initiation factor 2 subunit gamma X (eIF-2gX, eIF-2-gamma X)
  CDS (22)...(1440): EIF2S3
tttccttcctcttttggcaacatggcgggcggagaagctggagtgactctagggcagccgcatctttcgcgtcaggatctcaccaccttggatgttaccaagttgacgccactttcacacgaagttatcagcagacaagccacaattaacataggtacaattggtcatgtagctcatgggaaatccacagtcgtcaaagctatttctggagttcatactgtcaggttcaaaaatgaactagaaagaaatattacaatcaagcttggatatgctaatgctaagatttataagcttgatgacccaagttgccctcggccagaatgttatagatcttgtgggagcagtacacctgacgagtttcctacggacattccagggaccaaagggaacttcaaattagtcagacatgtttcctttgttgactgtcctggccacgatattttgatggctactatgctgaacggtgcagcagtgatggatgcagctcttctgttgatagctggtaatgaatcttgccctcagcctcagacatcggaacacctggctgctatagagatcatgaaactgaagcatattttgattctacaaaataaaattgatttggtaaaagaaagtcaggctaaagaacaatacgagcagatccttgcatttgtccaaggtacagtagcagagggagctcccattattccaatttcagctcagctgaaatacaatattgaagttgtttgtgagtacatagtaaagaaaattccagtacccccaagagactttacttcagagccccggcttattgttattagatcttttgatgtcaacaaacctggctgtgaagttgatgaccttaagggaggtgtagctggtggtagtatcctaaaaggagtattaaaggtgggccaggagatagaagtaagacctggtattgtttccaaagatagtgaaggaaaactcatgtgtaaaccaatcttttccaaaattgtatcactttttgcggagcataatgatctgcaatatgctgctccaggcggtcttattggagttggaacaaaaattgaccccactttgtgccgggctgacagaatggtggggcaagtacttggtgcagtcggagctttacctgagatattcacagaattggaaatttcctatttcctgcttagacggcttctaggtgtacgcactgaaggagacaagaaagcagcaaaggttcaaaagctgtctaagaatgaagtgctcatggtgaacataggatccctgtcaacaggagggagagttagtgctgtcaaggccgatttgggtaaaattgttttgaccaatccagtgtgcacagaggtaggagaaaaaattgcccttagccgaagagttgaaaaacactggcgtttaattggttggggtcagataagaagaggagtgacaatcaagccaacagtagatgatgactgaagaataccagttaaataatacattcggatggatttggaagttggaattcctcttaacaaccaaggggtttattttcaaagcaatattggggaattgatttcacagttcgttaccttagtaggtaacggtaaggttattctctttttttttttttttttttttggttatgaaaacttagggactaaaattaatataaaaattggcataatgttggattgaatctacattttggcagaagttaaacattcccacataatgtcaaaattatacatcatgcagttctgtttttttgtttgttttattttgttttgtttttgagtctggctctgtcacccaggctggagtgcagtggcgtgatctgcaacctctgccccccgggttcaagcgattctcctgcctcagcctcccgagtagctgagattacaggtgcgcgccaccacacttggctaatttttgtattattagtagagacggggtttcagcatgttggctaggccggtctctcctgacctcagggtgatcagcccacctcggcctcacaaagtgctgggattacaggcgtgagccaccttgcccagcccacatcatacagtttgaaatgaaactttgccacaaccagcctttgctgtagcacacacatatatcactgaacctgtttgaaataaagttttttttctttttcatgattcgtctttgagtacctccaggctgaaagactgttgtaccagtaaaaacttaaaggcacaaattctccttgaagaccttctcccttttatgtggccccatattttatgttgctttatctttgaaattttgcatgaaaaggaaatgaatggattcgaatgaaattgtcctttagagcatgattacttgttcccatggacaaatatttttctccccttgctcttcctggcctgaaacacgggaaaccagagtcaaaagttatctccctctccctgtgatgccttgagatttttttctgcgttgtttaatgcctgaaatccaagtcttcctccatgggaaaatactgttataccaaataattctagatgagtaacaaagatctttttaggccttcattttatgttttttcttaactgttatattatgattgtgacatagattatactactactaatttttggatgtttcaaaaggtcaagaagtaaaagatgttagaaagcaatgagtgagtccttttgatttttaacttattccccatgtccctatacttcgtgtgcttttcctttttttttttgagacggaggctcactccgtcacctaggctagagtacagtggcacgatcttggctcgctgcaacctctgcctccctgattcaagtgattctcgtgcttcagcctcccatgtagctgatattacaggcacttgccaccatacccggctaatttttgtatttttagtagagatggggtttcaccatgttgcccaggctggtcttgaactcctaacctcaggtgatccgcccgcctctgccttccaaagtgctgggattacaggcgtgagccactctgcccggcttatttttctttatgtttttgcttcgtaagaggttctgttgagcagtgatttgcaactcttgctgacgttgctggggaagctttaaaaaaaaaaaagatgccccacagagattctgattttaattgttctgatttaattggcttggagtagaattcaggcattgatatctttaaaaactccccagtgttgagaaacaaatttagagagttgagaagtaggtatattaaattacagaatcttactgagttttggtagactgataatacaatttgctttgcttttcttaaatttgcattgagatgggatttgaagcatattgtgctcttgtgaatgttgaagttgcattgtagaagtttagaagctctggctatgggttgcctaaattgatgttttgaggaagcatattaatgttataaacttcgctgactttgaaggttgtgttgtagcatgaggaacacaaataaaacaattctaaatcaaactaaaaaaaaaaaaaaaaaaaaaaa

SEQ ID NO: 81 - DNA, 571 bp, Homo sapiens
  60S ribosomal protein L30, L30
  CDS (116)...(463): RPL30
agttccggctctgccgtgaagagctttgcattgtgggaagtctttcctttctcgttccccggccatcttagcggctgctgttggttgggggccgtcccgctcctaaggcaggaagatggtggccgcaaagaagacgaaaaagtcgctggagtcgatcaactctaggctccaactcgttatgaaaagtgggaagtacgtcctggggtacaagcagactctgaagatgatcagacaaggcaaagcgaaattggtcattctcgctaacaactgcccagctttgaggaaatctgaaatagagtactatgctatgttggctaaaactggtgtccatcactacagtggcaataatattgaactgggcacagcatgcggaaaatactacagagtgtgcacactggctatcattgatccaggtgactctgacatcattagaagcatgccagaacagactggtgaaaagtaaaccttttcacctacaaaatttcacctgcaaaccttaaacctgcaaaattttcctttaataaaatttgcttgttttaaaaacattgtatctaaaaaaaaaaaaaaaaaa

SEQ ID NO: 82 - DNA, 2004 bp, Homo sapiens
  actin, gamma 1, transcript variant 2 (ACTG1, ACT, ACTG), cytoskeletal gamma-actin, deafness, autosomal dominant 20 (DFNA20), deafness, autosomal dominant 26 (DFNA26), BRWS2
  CDS (140)...(1267): ACTG1
gcgcgccgccgggccgcgcgggcgcgccgcttccgcttaaataacggcgggggaggccgcggtcggtctcagtcgccgctgccagctctcgcactctgttcttccgccgctccgccgtcgcgtttctctgccggtcgcaatggaagaagagatcgccgcgctggtcattgacaatggctccggcatgtgcaaagctggttttgctggggacgacgctccccgagccgtgtttccttccatcgtcgggcgccccagacaccagggcgtcatggtgggcatgggccagaaggactcctacgtgggcgacgaggcccagagcaagcgtggcatcctgaccctgaagtaccccattgagcatggcatcgtcaccaactgggacgacatggagaagatctggcaccacaccttctacaacgagctgcgcgtggccccggaggagcacccagtgctgctgaccgaggcccccctgaaccccaaggccaacagagagaagatgactcagattatgtttgagaccttcaacaccccggccatgtacgtggccatccaggccgtgctgtccctctacgcctctgggcgcaccactggcattgtcatggactctggagacggggtcacccacacggtgcccatctacgagggctacgccctcccccacgccatcctgcgtctggacctggctggccgggacctgaccgactacctcatgaagatcctcactgagcgaggctacagcttcaccaccacggccgagcgggaaatcgtgcgcgacatcaaggagaagctgtgctacgtcgccctggacttcgagcaggagatggccaccgccgcatcctcctcttctctggagaagagctacgagctgcccgatggccaggtcatcaccattggcaatgagcggttccggtgtccggaggcgctgttccagccttccttcctgggtatggaatcttgcggcatccacgagaccaccttcaactccatcatgaagtgtgacgtggacatccgcaaagacctgtacgccaacacggtgctgtcgggcggcaccaccatgtacccgggcattgccgacaggatgcagaaggagatcaccgccctggcgcccagcaccatgaagatcaagatcatcgcacccccagagcgcaagtactcggtgtggatcggtggctccatcctggcctcactgtccaccttccagcagatgtggattagcaagcaggagtacgacgagtcgggcccctccatcgtccaccgcaaatgcttctaaacggactcagcagatgcgtagcatttgctgcatgggttaattgagaatagaaatttgcccctggcaaatgcacacacctcatgctagcctcacgaaactggaataagccttcgaaaagaaattgtccttgaagcttgtatctgatatcagcactggattgtagaacttgttgctgattttgaccttgtattgaagttaactgttccccttggtatttgtttaataccctgtacatatctttgagttcaacctttagtacgtgtggcttggtcacttcgtggctaaggtaagaacgtgcttgtggaagacaagtctgtggcttggtgagtctgtgtggccagcagcctctgatctgtgcagggtattaacgtgtcagggctgagtgttctgggatttctctagaggctggcaagaaccagttgttttgtcttgcgggtctgtcagggttggaaagtccaagccgtaggacccagtttcctttcttagctgatgtctttggccagaacaccgtgggctgttacttgctttgagttggaagcggtttgcatttacgcctgtaaatgtattcattcttaatttatgtaaggttttttttgtacgcaattctcgattctttgaagagatgacaacaaattttggttttctactgttatgtgagaacattaggccccagcaacacgtcattgtgtaaggaaaaataaaagtgctgccgtaaccaaaaaaaaaaaaaaaaaaaa

SEQ ID NO: 83 - DNA, 3455 bp, Homo sapiens
  collagen, type VI, alpha 2 transcript variant 2C2 (COL6A2), collagen VI, alpha-2 polypeptide, collagen alpha-2(VI) chain, collagen VI alpha-2 C-terminal globular domain, PP3610
  CDS (83)...(3142): COL6A2
gcttactcggcgcccgcgcctcgggccgtcgggagcggagcctcctcgggaccaggacttcagggccacaggtgctgccaagatgctccagggcacctgctccgtgctcctgctctggggaatcctgggggccatccaggcccagcagcaggaggtcatctcgccggacactaccgagagaaacaacaactgcccagagaagaccgactgccccatccacgtgtacttcgtgctggacacctcggagagcgtcaccatgcagtcccccacggacatcctgctcttccacatgaagcagttcgtgccgcagttcatcagccagctgcagaacgagttctacctggaccaggtggcgctgagctggcgctacggcggcctgcacttctctgaccaggtggaggtgttcagcccaccgggcagcgaccgggcctccttcatcaagaacctgcagggcatcagctccttccgccgcggcaccttcaccgactgcgcgctggccaacatgacggagcagatccggcaggaccgcagcaagggcaccgtccacttcgccgtggtcatcaccgacggccacgtcaccggcagcccctgcgggggcatcaagctgcaggccgagcgggcccgcgaggagggcatccggctcttcgccgtggcccccaaccagaacctgaaggagcagggcctgcgggacatcgccagcacgccgcacgagctctaccgcaacgactacgccaccatgctgcccgactccaccgagatcgaccaggacaccatcaaccgcatcatcaaggtcatgaaacacgaagcctacggagagtgctacaaggtgagctgcctggaaatccctgggccctctggccccaagggctaccgtggacagaagggtgccaagggcaacatgggtgagccgggagagcctggccagaagggaagacagggagacccgggcatcgaaggccccattggattcccaggacccaagggcgttcctggcttcaaaggagagaagggtgaatttggagccgacggtcgcaagggggcccctggcctggctggcaagaacgggaccgatggacagaagggcaagctggggcgcatcggacctcctggctgcaagggagaccctggaaaccggggccccgacggttacccgggggaagcagggagtccaggggagcgaggagaccaaggcggcaagggggaccctggccgcccaggacgcagagggcccccgggagaaatcggggccaagggaagcaaggggtatcaaggcaacagtggagccccaggaagtcctggtgtgaaaggagccaagggcgggcctgggccccgcggacccaaaggcgagccggggcgcaggggagaccccggcaccaagggcagcccaggcagcgatggccccaagggggagaagggggaccctggccctgaggggccccgcggcctggctggagaggttggcaacaaaggagccaagggagaccgaggcttgcctggacccagaggcccccagggagctcttggggagcccggaaagcagggatctcggggagaccccggtgatgcaggaccccgtggagactcaggacagccaggccccaagggagaccccggcaggcctggattcagctacccaggaccccgaggagcacccggagaaaaaggcgagcccggcccacgcggccccgagggaggccgaggcgactttggcttgaaaggagaacctgggaggaaaggagagaaaggagagcctgcggatcctggtccccctggtgagccaggccctcgggggccaagaggagtcccaggacccgagggtgagcccggcccccctggagaccccggtctcacggagtgtgacgtcatgacctacgtgagggagacctgcgggtgctgcgactgtgagaagcgctgtggcgccctggacgtggtcttcgtcatcgacagctccgagagcattgggtacaccaacttcacactggagaagaacttcgtcatcaacgtggtcaacaggctgggtgccatcgctaaggaccccaagtccgagacagggacgcgtgtgggcgtggtgcagtacagccacgagggcacctttgaggccatccagctggacgacgaacgtatcgactccctgtcgagcttcaaggaggctgtcaagaacctcgagtggattgcgggcggcacctggacaccctcagccctcaagtttgcctacgaccgcctcatcaaggagagccggcgccagaagacacgtgtgtttgcggtggtcatcacggacgggcgccacgaccctcgggacgatgacctcaacttgcgggcgctgtgcgaccgcgacgtcacagtgacggccatcggcatcggggacatgttccacgagaagcacgagagtgaaaacctctactccatcgcctgcgacaagccacagcaggtgcgcaacatgacgctgttctccgacctggtcgctgagaagttcatcgatgacatggaggacgtcctctgcccggaccctcagatcgtgtgcccagaccttccctgccaaacagagctgtccgtggcacagtgcacgcagcggcccgtggacatcgtcttcctgctggacggctccgagcggctgggtgagcagaacttccacaaggcccggcgcttcgtggagcaggtggcgcggcggctgacgctggcccggagggacgacgaccctctcaacgcacgcgtggcgctgctgcagtttggtggccccggcgagcagcaggtggccttcccgctgagccacaacctcacggccatccacgaggcgctggagaccacacaatacctgaactccttctcgcacgtgggcgcaggcgtggtgcacgccatcaatgccatcgtgcgcagcccgcgtggcggggcccggaggcacgcagagctgtccttcgtgttcctcacggacggcgtcacgggcaacgacagtctgcacgagtcggcgcactccatgcgcaagcagaacgtggtacccaccgtgctggccttgggcagcgacgtggacatggacgtgctcaccacgctcagcctgggtgaccgcgccgccgtgttccacgagaaggactatgacagcctggcgcaacccggcttcttcgaccgcttcatccgctggatctgctagcgccgccgcccgggccccgcagtcgagggtcgtgagcccaccccgtccatggtgctaagcgggcccgggtcccacacggccagcaccgctgctcactcggacgacgccctgggcctgcacctctccagctcctcccacggggtccccgtagccccggcccccgcccagccccaggtctccccaggccctccgcaggctgcccggcctccctccccctgcagccatcccaaggctcctgacctacctggcccctgagctctggagcaagccctgacccaataaaggctttgaacccataaaaaaaaaaaaaaaa

SEQ ID NO: 84 - DNA, 2801 bp, Homo sapiens
  ubiquitin-60S ribosomal protein L40 precursor transcript variant 2 (UBA52), RPL40, ubiquitin-52 amino acid fusion protein, ubiquitin carboxyl extension protein 52 (CEP52, HUBCEP52)
  CDS (93)...(479): UBA52
gctccgtgcgcaagcgctttcggcggcgattaggtggtttccggttccgctatcttctttttcttcagcgaggcggccgagctgacgcaaacatgcagatctttgtgaagaccctcactggcaaaaccatcacccttgaggtcgagcccagtgacaccattgagaatgtcaaagccaaaattcaagacaaggagggtatcccacctgaccagcagcgtctgatatttgccggcaaacagctggaggatggccgcactctctcagactacaacatccagaaagagtccaccctgcacctggtgttgcgcctgcgaggtggcattattgagccttctctccgccagcttgcccagaaatacaactgcgacaagatgatctgccgcaagtgctatgctcgccttcaccctcgtgctgtcaactgccgcaagaagaagtgtggtcacaccaacaacctgcgtcccaagaagaaggtcaaataaggtggttctttccttgaagggcagcctcctgcccaggccccgtggccctggagcctcaataaagtgtccctttcattgactggagcagcaattggtgtcctcatggctgatctgtccagggaggtggctgaagagtgggcatctcccttagggactctactcagcactccattctgtgccacctgtggggtcttctgtcctagattctgtcacatcggcattggtccctgccctatgcccctgactctggatttgtcatctgtaaaactggagtaaaaacctcagtcgtgtaattggtgggactgaggatcagttttgtcattgctgggatcctgtcaggcactttgaggtgtccctcaggccttggccctgaagtgtctaggtgtgtggagatgggtagaaaattaggtacacccaatggtgtagaacgttgattctcaaatttttttattttatacaaatggggtctcactatgttgtccaggctggtcttgaactcctgggctcaagccatccgcccatctcagcccctcaaagtgttgggattacaagcaagaactgccatgcctgacccagttctcagttttttgtttgtttgtttgtttgtttgttttgagacggagtcttgctctgtcgcccaggctggagtgcagtggcgcagtctcggcttactacaacctctgcctccggggttcacatccttctcctgcctcagcctcccgagtagctgggactacaggtgcccgccacaactcctggctaattttttgtatttttagtagagacggggtttcactgggttagccaggttggtctcgatctcctgaccttgtgatccattcgccttggcctcccagaatgctggtattacaggcgtgagccagcacgcctggcccagttactcagttttgaatctgaggccgtgacatcactcatggtctgcagtcagtgctctgcccctgagctgtaccctctcctatgataatcactcttaagaagggcaacccttggtgttttccccttaaggtcacccaggctggaatgcagtggtgtggtcatggctccctgtaccctggaactcaggcttgggtgatcctctctcctttgcctccgaagtagccaggactacaggtgtgcacccaccaccacactcagataattgctttggtgtttttaaagcttgtaatgatcagtaggctgaggtgggcaaatcataaggtcaagagttttttagatggggtgagcacagaccaattcctgttttatttactgatttaaaattttgagacagtctcactgtcacccaggttggggtgcagtggtaggatcatagcttgctgcagccttgatctcccaggatcttgcctcagcctcccgagtagctgggactgcatgcttgtgccaccacactcggttaatattttgtagagatggggtcttgctatgttgcccaggctggcttcaaactcctgaacttaaaagcctcctgtttagttttggttttttatcactttttttttttttttttgagatggagccttgctcccatcgtgcaggctggagtgcggtggcgcagtctcggctcactgcagcttctgcctctcgggttcaagcgattctcctttctcagcctcttgagtagctggaattaccagtgtgcgccaccaccaccacgcctggctagtttttctgtttttagtagagacagggttttgctatgttggccaggctggtcttgaactactgacctcttgtgatctacctgtcttggccttccaaagtgctaggattacaagcgtaagccacagcgcctggccttgctacatttttttttttttttttttttttacagacatggtctcgctatgttgcccagaatggttttgcactgggtccaagcagttctgccgcagcctcccaaagtgctgggattacaggggtgaggcaccttgctggcccctgttttgattagggtgcagtgctggtgaagccggtgcacgaggccagtgatgcatcctaatgaggggtggagttggcgggacttcctgggccagtttggggactttcacaaaagacccccatgactcagggttttgagttcttaactgatcgaatgaaggattcaaaattaaccactccaaggggggattgaaggaagaaccactcttaatggacaaaaagaaagaaaggggagggagtaacagggatatgagctctagccgcccaagctagcaatggcaacccttctgggtccccttccagcatgtggaagctttcctttcgcttcattcaataaacagctgctgctcaaaaaaaaaaaaa

SEQ ID NO: 85 - DNA, 1331 bp, Homo sapiens
  alkB, alkylation repair homolog 7 (E. coli), alkylated DNA repair protein alkB homolog 7, alpha-ketoglutarate-dependent dioxygenase alkB homolog 7, mitochondrial (ALKBH7), spermatogenesis associated 11 (SPATA11), spermatogenesis cell proliferation-related protein
  CDS (389)...(1054): ALKBH7
gactccataaccgtggccttggccccagtccccctgacttccggacttcagaccagatactgcccatatccccttatgaagtcttggccaggcaacccctagggtgtacgttttctaatgattaaagaggcggtgctaagctgcagacggacttgcgactcagccactggtgtaagtcaggcgggaggtggcgcccaataagctcaagagaggaggcgggttctggaaaaaggccaatagcctgtgaaggcgagtctagcagcaaccaatagctatgagcgagaggcgggactctgagggaagtcaatcgctgccgcaggtaccgccaatggcttttggcgggggcgttccccaaccctgccctctctcatgaccccgctccgggattatggccgggactgggctgctggcgctgcggacgctgccagggcccagctgggtgcgaggctcgggcccttccgtgctgagccgcctgcaggacgcggccgtggtgcggcctggcttcctgagcacggcagaggaggagacgctgagccgagaactggagcccgagctgcgccgccgccgctacgaatacgatcactgggacgcggccatccacggcttccgagagacagagaagtcgcgctggtcagaagccagccgggccatcctgcagcgcgtgcaggcggccgcctttggccccggccagaccctgctctcctccgtgcacgtgctggacctggaagcccgcggctacatcaagccccacgtggacagcatcaagttctgcggggccaccatcgccggcctgtctctcctgtctcccagcgttatgcggctggtgcacacccaggagccgggggagtggctggaactcttgctggagccgggctccctctacatccttaggggctcagcccgttatgacttctcccatgagatccttcgggatgaagagtccttctttggggaacgccggattccccggggccggcgcatctccgtgatctgccgctccctccctgagggcatggggccaggggagtctggacagccgcccccagcctgctgacccccagctttctacagacaccagatttgtgaataaagttggggaatggacagcctaactgggacattgcagtggctgcttgctggggccgggatttgcaggggaacccaggatggcactggcccatagggagctccaggtgtggctggctggacacatggtcaaagtcacaaggccgggagagtggtgtcctttattgcactcactgctggtcgccccagcccactcccctcctcgttgtctctgcatccaggtctccaataaataagtcagccga

SEQ ID NO: 86 - DNA, 1035 bp, Homo sapiens
  60S ribosomal protein L5, L5, DBA6, MSTP030
  CDS (79)...(972): RPL5
ggcccttttcccaccccctagcgccgctgggcctgcaggtctctgtcgagcagcggacgccggtctctgttccgcaggatggggtttgttaaagttgttaagaataaggcctactttaagagataccaagtgaaatttagaagacgacgagagggtaaaactgattattatgctcggaaacgcttggtgatacaagataaaaataaatacaacacacccaaatacaggatgatagttcgtgtgacaaacagagatatcatttgtcagattgcttatgcccgtatagagggggatatgatagtctgcgcagcgtatgcacacgaactgccaaaatatggtgtgaaggttggcctgacaaattatgctgcagcatattgtactggcctgctgctggcccgcaggcttctcaataggtttggcatggacaagatctatgaaggccaagtggaggtgactggtgatgaatacaatgtggaaagcattgatggtcagccaggtgccttcacctgctatttggatgcaggccttgccagaactaccactggcaataaagtttttggtgccctgaagggagctgtggatggaggcttgtctatccctcacagtaccaaacgattccctggttatgattctgaaagcaaggaatttaatgcagaagtacatcggaagcacatcatgggccagaatgttgcagattacatgcgctacttaatggaagaagatgaagatgcttacaagaaacagttctctcaatacataaagaacagcgtaactccagacatgatggaggagatgtataagaaagctcatgctgctatacgagagaatccagtctatgaaaagaagcccaagaaagaagttaaaaagaagaggtggaaccgtcccaaaatgtcccttgctcagaagaaggatcgggtagctcaaaagaaggcaagcttcctcagagctcaggagcgggctgctgagagctaaacccagcaattttctatgattttttcagatatagataataaacttatgaacagcaactaaaaa

SEQ ID NO: 87 - DNA, 1043 bp, Homo sapiens
  6-phosphogluconolactonase (PGLS, 6PGL)
  CDS (51)...(827): PGLS
ctagcgacggccgtagggagcgcttcctcctccccgccgccgccctcgccatggccgcgccggccccgggcctcatctcggtgttctcgagttcccaggagctgggtgcggcgctagcgcagctggtggcccagcgcgcagcatgctgcctggcaggggcccgcgcccgtttcgcgctcggcctgtcgggcgggagcctcgtctcgatgctagcccgcgagctacccgccgccgtcgcccctgccgggccagctagcttagcgcgctggacgctgggcttctgcgacgagcgcctcgtgcccttcgatcacgccgagagcacgtacggcctctaccggacgcatcttctctccagactgccgatcccagaaagccaggtgatcaccattaaccccgagctgcctgtggaggaggcggctgaggactacgccaagaagctgagacaggcattccaaggggactccatcccggttttcgacctgctgatcctgggggtgggccccgatggtcacacctgctcactcttcccagaccaccccctcctacaggagcgggagaagattgtggctcccatcagtgactccccgaagccaccgccacagcgtgtgaccctcacactacctgtcctgaatgcagcacgaactgtcatctttgtggcaactggagaaggcaaggcagctgttctgaagcgcattttggaggaccaggaggaaaacccgctgcccgccgccctggtccagccccacaccgggaaactgtgctggttcttggacgaggcggccgcccgcctcctgaccgtgcccttcgagaagcattccactttgtagctggccagagggacgccgcagctgggaccaggcacgcggcccatggggctgggcccctgctggccgccactctccgggctctcctttcaaaaagccacgtcgtgctgctgctggaagccaacagcctccggccagcagccctacccggggctcaacacacaggctgtggctctggacatccggatattaaaaggagcgttgctggaaaaaaaaaaa

SEQ ID NO: 88 - DNA, 1976 bp, Homo sapiens
  cold shock domain protein A transcript variant 1 (CSDA),cold-shock domain containing A1 (CSDA1), Y box binding protein 3 (YBX3), single-strand DNA-binding protein NF-GMB, DNA-binding protein A (DBPA), ZO-1-associated nucleic acid-binding protein (ZONAB)
  CDS (244)...(1362): CSDA
agaaaaacttgtgcggggccatttttggggcagtaagatcgagcgaggagcccaagagcgagcgcgcagcacgaagctcgagccgcctccgccgcgcgaccccacctcggccgccgccgcctgcgccgcgagatccgccccggcctccccgagagcgagccccggccgccgcgaccaccagccgcgctaaccgccgaccaaccgccaccgaggcgcctgagcgagagcagaggaggaggaggcatgagtgaggcgggcgaggccaccaccaccaccaccaccaccctcccgcaggctccgacggaggcggccgccgcggctccccaggaccccgcgcccaagagcccggtgggcagcggtgcgccccaggccgcggccccggcgcccgccgcccacgtcgcaggaaaccccggtggggacgcggcccccgcagccacgggcaccgcggccgccgcctctttagccaccgccgccggcagcgaagacgcggagaaaaaagttctcgccaccaaagtccttggcactgtcaaatggttcaacgtcagaaatggatatggatttataaatcgaaatgacaccaaagaagatgtatttgtacatcagactgccatcaagaagaataacccacggaaatatctgcgcagtgtaggagatggagaaactgtagagtttgatgtggttgaaggagagaagggtgcagaagctgccaatgtgactggcccggatggagttcctgtggaagggagtcgttacgctgcagatcggcgccgttacagacgtggctactatggaaggcgccgtggccctccccggaattacgctggggaggaggaggaggaagggagcggcagcagtgaaggatttgacccccctgccactgataggcagttctctggggcccggaatcagctgcgccgcccccagtatcgccctcagtaccggcagcggcggttcccgccttaccacgtgggacagacctttgaccgtcgctcacgggtcttaccccatcccaacagaatacaggctggtgagattggagagatgaaggatggagtcccagagggagcacaacttcagggaccggttcatcgaaatccaacttaccgcccaaggtaccgtagcaggggacctcctcgcccacgacctgccccagcagttggagaggctgaagataaagaaaatcagcaagccaccagtggtccaaaccagccgtctgttcgccgtggataccggcgtccctacaattaccggcgtcgcccgcgtcctcctaacgctccttcacaagatggcaaagaggccaaggcaggtgaagcaccaactgagaaccctgctccacccacccagcagagcagtgctgagtaacaccaggctcctcaggcaccttcaccatcggcaggtgacctaaagaattaatgaccattcagaaataaagcaaaaagcaggccacaaccttaaccaacaccaaagaaacatccaagcaataaagtggaagactaaccaagatttggacattggaatgtttactgttattctttaagaaacaactacaaaaagaaaatgtcaacaaatttttccagcaagctgagaacctgggaattcctgcacggaagacaagagagtagcctctccagtttcagcaaccgctaggtttctattttttttcctggtttttactgttttggtaatatatatattgaaacaagaaatattaataccacatggggagaaccccaaccaaagaaatctgaaatatatagtaaatgcttttttttccgtttttgttcattttggatgctggtgctaaacctccaagtgtcatgatttaaaaaaaaaaaaaatttatgtccttcttatttatttctaggatgaggggaggataacatttttgctttcttatgtgactctctttgaaaatgtgcagtaagaaattcctcaaaaataaaatttttacccttcagaggacagaatgtttaaaa

SEQ ID NO: 89 - DNA, 972 bp, Homo sapiens
  60S ribosomal protein L6, L6, neoplasm-related protein C140, tax-responsive enhancer element-binding protein 107 (TAXREB107, TXREB1), DNA-binding protein TAXREB107, SHUJUN-2
  CDS (54)...(920): RPL6
gattgcttatagaccggaagccgggaccttaattctctttcccatcttgcaagatggcgggtgaaaaagttgagaagccagatactaaagagaagaaacccgaagccaagaaggttgatgctggtggcaaggtgaaaaagggtaacctcaaagctaaaaagcccaagaaggggaagccccattgcagccgcaaccctgtccttgtcagaggaattggcaggtattcccgatctgccatgtattccagaaaggccatgtacaagaggaagtactcagccgctaaatccaaggttgaaaagaaaaagaaggagaaggttctcgcaactgttacaaaaccagttggtggtgacaagaacggcggtacccgggtggttaaacttcgcaaaatgcctagatattatcctactgaagatgtgcctcgaaagctgttgagccacggcaaaaaacccttcagtcagcacgtgagaaaactgcgagccagcattacccccgggaccattctgatcatcctcactggacgccacaggggcaagagggtggttttcctgaagcagctggctagtggcttattacttgtgactggacctctggtcctcaatcgagttcctctacgaagaacacaccagaaatttgtcattgccacttcaaccaaaatcgatatcagcaatgtaaaaatcccaaaacatcttactgatgcttacttcaagaagaagaagctgcggaagcccagacaccaggaaggtgagatcttcgacacagaaaaagagaaatatgagattacggagcagcgcaagattgatcagaaagctgtggactcacaaattttaccaaaaatcaaagctattcctcagctccagggctacctgcgatctgtgtttgctctgacgaatggaatttatcctcacaaattggtgttctaaatgtcttaagaacctaattaaatagctgactacaaaaaaaaaaaaaaaaaaa

SEQ ID NO: 90 - DNA, 2820 bp, Homo sapiens
  40S ribosomal protein S24 transcript variant d, S24, DBA3
  CDS (143)...(1012): RPS24
aggcatcggcgcggtcagcctcgtggcgcgcccacgcccccacgccggctcttcccggggtccttccgtgcgcgttgatatgattggccggcgaatcgtggttctcttttcctccttggctgtctgaagatagatcgccatcatgaacgacaccgtaactatccgcactagaaagttcatgaccaaccgactacttcagaggaaacaaatggtcattgatgtccttcaccccgggaaggcgacagtgcctaagacagaaattcgggaaaaactagccaaaatgtacaagaccacaccggatgtcatctttgtatttggattcagaactcattttggtggtggcaagacaactggctttggcatgatttatgattccctggattatgcaaagaaaaatgaacccaaacatagacttgcaagacatggcctgtatgagaagaaaaagacctcaagaaagcaacgaaaggaacgcaagaacagaatgaagaaagtcagggggactgcaaaggccaatgttggtgctggcaaaaagatgagggaattggggcttggagtgcaagcattgggaagaatttcccaggaagagagatgcacagatgtgaagaactcgaaggcaagagaaagccggggggttgtgtggcaggtagaagtgccaggaccgtggagcgtgtggacatgtggcagattgcggaggggctgtggcaagtatttacaggtggccgttacctggaggaagactgaaaacagagaacagtgctgccaggcgtgccttttggagagggcactggtcagaaacggagccttcatgtcgcctgcctcacctgctcctgctggttctccccaccctgtggacggtgacttggtcctccacttgccagaagccttgtcagcaaccttgactctgtcaccccacatccaggccatcaacaagtcttttggccctttctttgaaatccaccaggaatccagctgcttctccccaccttcctgcctctctggtctgggccactaatgtcactgccatggccgccttgctgcatttctgaggatgcttcatctctccaccttcttctccactcagcagccagcagggcactgtggaaatcggagtcacatgagctggcacctctgttcagaaccctccagggctccacatctctctcacccaaatgccaaagacctccccacgcccccacaatcccccacgacctggccactggcctcccaccaccttccagctccagcggctcctaccacatttaaggctttccttcctagttttaatttttcctcgtcagcagttgattttattattttcttgtttattggtattttcccactagaaatgaagctgcgtgaagttagagatttttttttttggtctgtgttcctaattagctcattgctatacccctggcgcccagaacaatgccttggacacagtacgcagtagactaaataaatacttgttgaatgactgactgacggaatgacggctgtgtggggagtggattgggtcgtgaggcagaggctgcggtggaaactcaggcaggaggtgatggtggttcttggggctgcggaatgccaagtttagaagctcttcctctgctgtggcacatgaaccggtcactcgagaaggcttttagatttactttgcctaatcccctcttagtgcatgtggggaaactgaggtacacaaaaggaattccccaccaagttaggggcagaacctagcccccttgtctcccagatggatatcttcttttttttttgagacggagtcttgctctgttgcccaggctggagtgcagtggtaccatcttggctcactgcaacctctgcttcccaggttcaagcgattctcctgcctcagcctcctgagtgtctgcgattacaggtgcacacaaccacgcctggctaatttttgtatttttagtagagacggggtttcaccgtgttggtcagggtgacctcaaactcctgacctcatgatccacccagctcagcctcccaacgtgctgggattacaggcatgagccaccgtgcctggctggacatcttgttattaaagcttcttctctctttgtaggggagggggagatgcctctggtggagaagaccagtgtggcagtgactgtgtctgttagtgaacctggtggctggttgagggtctgtcgtggtgactgaggacacatacaaagtgcttttctcagtggtcaccttggtgttggtgaataagggtcagaagatggctcctgtcctagggcactgccagtcggtttggaagctgaaatgcctgcttagcagtttgaggaaacacagaccttggaggatcttctggttgcctcttcaagaattcattctattccccttctgctccccaaatttgcttttcttggggtgggtcttggttggcctaagccaagaaagtatggcatctactccttccatagcaatagctcaggaataggcagtgacccagacctgaaccaatcagtgcatggaattacccctggccaaagtggttgattgaggctgggtgcaagcagagttgtgagaaggctcccatttggtggttggagagatcgcacttgctccagaggtcataatgtgcagatctgaggcttggaactgctgcagacattttgctaccacaagtgaagccaccctgacgacacagttgacaatttggagcagggcagagctgagagaacagcagggaaacagccagagtcttgctcaagcctccctgaagtatctatacccctggactctagttatgggggctaataaatgttatatactgtttaaggtaaaaaa

SEQ ID NO: 91 - DNA, 2099 bp, Homo sapiens
  60S ribosomal protein L22 proprotein, L22, Epstein-Barr virus small RNA-associated protein, EBER-associated protein (EAP), heparin-binding protein 15 (HBP15, HBp15, HBP15/L22)
  CDS (47)...(433): RPL22
gcgtctgcgtagttcgctcacctccctttctaactccgctgccgccatggctcctgtgaaaaagcttgtggtgaaggggggcaaaaaaaagaagcaagttctgaagttcactcttgattgcacccaccctgtagaagatggaatcatggatgctgccaattttgagcagtttttgcaagaaaggatcaaagtgaacggaaaagctgggaaccttggtggaggggtggtgaccatcgaaaggagcaagagcaagatcaccgtgacatccgaggtgcctttctccaaaaggtatttgaaatatctcaccaaaaaatatttgaagaagaataatctacgtgactggttgcgcgtagttgctaacagcaaagagagttacgaattacgttacttccagattaaccaggacgaagaagaggaggaagacgaggattaaatttcatttatctggaaaattttgtatgagttcttgaataaaacttgggaaccaaaatggtggtttatccttgtatctctgcagtgtggattgaacagaaaattggaaatcatagtcaaagggcttcccttggttcgccactcatttatttgtaacttgacttctttttttttctgcttaaaaatttcaattctcgtggtaataccagagtagaaggagagggtgactttaccgaactgacagccattggggaggcagatgcgggtgtggaggtgtgggctgaaggtagtgactgtttgattttaaaaagtgtgactgtcagttgtatctgttgcttttctcaatgattcagggatacaaatgggcttctctcattcattaaaagaaaacgcgacatctttctaagattctctgtgggaaaatgactgtcaataaaatgcgggtttctgggccattcgtcttactttcattttttgattacaaatttctcttgacgcacacaattatgtctgctaatcctcttcttcctagagagagaaactgtgctccttcagtgttgctgccataaaggggtttggggaatcgattgtaaaagtcccaggttctaaattaactaaatgtgtacagaaatgaacgtgtaagtaatgtttctacaggtctttgcaacaaactgtcactttcgtctccagcagagggagctgtaggaatagtgcttccagatgtggtctcccgtgtggggcccagcaatgggggcccctgatgccaagagctctggaggttcttgaaagaggggacacgaaggaggagtgactgggaagcctcccatgccaaggaggtgggaggtgccctggaaatagctgcctcatgccacttaggccatgactggatttaatgtcagtggtgtgccacagtgcagaggctagacaactgaaaggggctaccaaggctgggaaaaaaatgcaattgttgctgtgagtgactttgaaagactctggtgccttgtggtgcccttctgaaattcaaacagtaatgcaaaagtgtctgcattagaatttacggtgtctaaaattcatgtttttaaaagagcttgcctacagatggtttccacacttgaaattgtgccctgcgagttgcatagctggaagttcaatgctcagtcctaccttggctcccattaaacatttggtgctctgtggattgagttgaacgtgttgaggctttgcaatttcacttgtgttaaaggctctggcatttttccatttctatgcaaatttctttgaagcagaattgcttgcatatttcttctctgccgtcacagaaagcagagtttctttcaaacttcactgaggcatcagttgctctttggcaatgtcccttaaccatgattattaactaagtttgtggcttgagtttacaaattctacttgttgcattgatgttcccatgtagtaagtcatttttagtttggttgtgaaaaaaccctgggctgaagttggcatttcagttaaaagaaaaaaagaaactagtcccagatttgaaaacttgtaataaaattgaaactcactggttttctatgtctttttgaactcttgtaatcgagttttgatcatattttctattaaagtggctaacacctggctactcttactgtaaaaaaaaaaaaaaa

SEQ ID NO: 92 - DNA, 3499 bp, Homo sapiens
  adaptor-related protein complex 2, alpha 1 subunit transcript variant 1 (AP2A1), clathrin-associated/assembly/adaptor protein, large, alpha 1 (CLAPA1), alpha1-adaptin, alpha-adaptin A, AP-2 complex subunit alpha-1, 100 kDa coated vesicle protein A
  CDS (212)...(3145): AP2A1
cggctcagagctccggaccgcgggcggaggggaggggcagggggcggtgccacggcctgccagcccgcccgcccgcccgccagccagccctccccgcggccggctcggctccttggcgctgcctggggtcctttccgcccggtccccgcttgccagcccccgctgctctgtgccctgtccggccaggcctggagccgacaccaccgccatcatgccggccgtgtccaagggcgatgggatgcgggggctcgcggtgttcatctccgacatccggaactgtaagagcaaagaggcggaaattaagagaatcaacaaggaactggccaacatccgctccaagttcaaaggagacaaagccttggatggctacagtaagaaaaaatatgtgtgtaaactgcttttcatcttcctgcttggccatgacattgactttgggcacatggaggctgtgaatctgttgagttccaataaatacacagagaagcaaataggttacctgttcatttctgtgctggtgaactcgaactcggagctgatccgcctcatcaacaacgccatcaagaatgacctggccagccgcaaccccaccttcatgtgcctggccctgcactgcatcgccaacgtgggcagccgggagatgggcgaggcctttgccgctgacatcccccgcatcctggtggccggggacagcatggacagtgtcaagcagagtgcggccctgtgcctccttcgactgtacaaggcctcgcctgacctggtgcccatgggcgagtggacggcgcgtgtggtacacctgctcaatgaccagcacatgggtgtggtcacggccgccgtcagcctcatcacctgtctctgcaagaagaacccagatgacttcaagacgtgcgtctctctggctgtgtcgcgcctgagccggatcgtctcctctgcctccaccgacctccaggactacacctactacttcgtcccagcaccctggctctcggtgaagctcctgcggctgctgcagtgctacccgcctccagaggatgcggctgtgaaggggcggctggtggaatgtctggagactgtgctcaacaaggcccaggagccccccaaatccaagaaggtgcagcattccaacgccaagaacgccatcctcttcgagaccatcagcctcatcatccactatgacagtgagcccaacctcctggttcgggcctgcaaccagctgggccagttcctgcagcaccgggagaccaacctgcgctacctggccctggagagcatgtgcacgctggccagctccgagttctcccatgaagccgtcaagacgcacattgacaccgtcatcaatgccctcaagacggagcgggacgtcagcgtgcggcagcgggcggctgacctcctctacgccatgtgtgaccggagcaatgccaagcagatcgtgtcggagatgctgcggtacctggagacggcagactacgccatccgcgaggagatcgtcctgaaggtggccatcctggccgagaagtacgccgtggactacagctggtacgtggacaccatcctcaacctcatccgcattgcgggcgactacgtgagtgaggaggtgtggtaccgtgtgctacagatcgtcaccaaccgtgatgacgtccagggctatgccgccaagaccgtctttgaggcgctccaggcccctgcctgtcacgagaacatggtgaaggttggcggctacatccttggggagtttgggaacctgattgctggggacccccgctccagccccccagtgcagttctccctgctccactccaagttccatctgtgcagcgtggccacgcgggcgctgctgctgtccacctacatcaagttcatcaacctcttccccgagaccaaggccaccatccagggcgtcctgcgggccggctcccagctgcgcaatgctgacgtggagctgcagcagcgagccgtggagtacctcaccctcagctcagtggccagcaccgacgtcctggccacggtgctggaggagatgccgcccttccccgagcgcgagtcgtccatcctggccaagctgaaacgcaagaaggggccaggggccggcagcgccctggacgatggccggagggaccccagcagcaacgacatcaacgggggcatggagcccacccccagcactgtgtcgacgccctcgccctccgccgacctcctggggctgcgggcagcccctcccccggcagcacccccggcttctgcaggagcagggaaccttctggtggacgtcttcgatggcccggccgcccagcccagcctggggcccacccccgaggaggccttcctcagcgagctggagccgcctgcccccgagagccccatggctttgctggctgacccagctccagctgctgacccaggtcctgaggacatcggccctcccattccggaagccgatgagttgctgaataagtttgtgtgtaagaacaacggggtcctgttcgagaaccagctgctgcagatcggagtcaagtcagagttccgacagaacctgggccgcatgtatctcttctatggcaacaagacctcggtgcagttccagaatttctcacccactgtggttcacccgggagacctccagactcagctggctgtgcagaccaagcgcgtggcggcgcaggtggacggcggcgcgcaggtgcagcaggtgctcaatatcgagtgcctgcgggacttcctgacgcccccgctgctgtccgtgcgcttccggtacggtggcgccccccaggccctcaccctgaagctcccagtgaccatcaacaagttcttccagcccaccgagatggcggcccaggatttcttccagcgctggaagcagctgagcctccctcaacaggaggcgcagaaaatcttcaaagccaaccaccccatggacgcagaagttactaaggccaagcttctggggtttggctctgctctcctggacaatgtggaccccaaccctgagaacttcgtgggggcggggatcatccagactaaagccctgcaggtgggctgtctgcttcggctggagcccaatgcccaggcccagatgtaccggctgaccctgcgcaccagcaaggagcccgtctcccgtcacctgtgtgagctgctggcacagcagttctgagccctggactctgccccgggggatgtggccggcactgggcagccccttggactgaggcagttttggtggatgggggacctccactggtgacagagaagacaccagggtttgggggatgcctgggactttcctccggccttttgtatttttatttttgttcatctgctgctgtttacattctggggggttagggggagtccccctccctccctttcccccccaagcacagaggggagaggggccagggaagtggatgtctcctcccctcccaccccaccctgttgtagcccctcctaccccctccccatccaggggctgtgtattattgtgagcgaataaacagagagacgctaa

SEQ ID NO: 93 - DNA, 5125 bp, Homo sapiens
  nucleosome assembly protein 1-like 1 transcript variant 2 (NAP1L1, NAP1, NAP1L), NAP-1-related protein, HSP22-like protein interacting protein
  CDS (413)...(1588): NAP1L1
aaaagatatggtggggtgcttaacagaggaggttagacaccggcgggaaccagaggagcccaagcgcggcgcctgggcctcggggctgcaggagtcctcggtgggggtatggaggtcgccggggaaggaggacggttcagttgctaggcaacccggcctggacccgcctctcgctcgcgttgctgggagactacaaggccgggaggagggcggcgaaagggccctacgtgctgacgctaattgtatatgagcgcgagcggcgggctcttgggtcttttttagcgccatctgctcgcggcgccgcctcctgctcctcccgctgctgctgccgctgccgccctgagtcactgcctgcgcagctccggccgcctggctccccatactagtcgccgatatttggagttcttacaacatggcagacattgacaacaaagaacagtctgaacttgatcaagatttggatgatgttgaagaagtagaagaagaggaaactggtgaagaaacaaaactcaaagcacgtcagctaactgttcagatgatgcaaaatcctcagattcttgcagcccttcaagaaagacttgatggtctggtagaaacaccaacaggatacattgaaagcctgcctagggtagttaaaagacgagtgaatgctctcaaaaacctgcaagttaaatgtgcacagatagaagccaaattctatgaggaagttcacgatcttgaaaggaagtatgctgttctctatcagcctctatttgataagcgatttgaaattattaatgcaatttatgaacctacggaagaagaatgtgaatggaaaccagatgaagaagatgagatttcggaggaattgaaagaaaaggccaagattgaagatgagaaaaaagatgaagaaaaagaagaccccaaaggaattcctgaattttggttaactgtttttaagaatgttgacttgctcagtgatatggttcaggaacacgatgaacctattctgaagcacttgaaagatattaaagtgaagttctcagatgctggccagcctatgagttttgtcttagaatttcactttgaacccaatgaatattttacaaatgaagtgctgacaaagacatacaggatgaggtcagaaccagatgattctgatcccttttcttttgatggaccagaaattatgggttgtacagggtgccagatagattggaaaaaaggaaagaatgtcactttgaaaactattaagaagaagcagaaacacaagggacgtgggacagttcgtactgtgactaaaacagtttccaatgactctttctttaacttttttgcccctcctgaagttcctgagagtggagatctggatgatgatgctgaagctatccttgctgcagacttcgaaattggtcactttttacgtgagcgtataatcccaagatcagtgttatattttactggagaagctattgaagatgatgatgatgattatgatgaagaaggtgaagaagcggatgaggaaggggaagaagaaggagatgaggaaaatgatccagactatgacccaaagaaggatcaaaacccagcagagtgcaagcagcagtgaagcaggatgtatgtggccttgaggataacctgcactgtaatagcctaaacacaactcttatttacttacagccttatgtttttgtattttcttggtagactaggtaatttttttttaaaggacaggaaactgatattttaaagaccaatttgttctacctagcattttaactagtttttctgccagctatgttgaatgcacaaattctgtcacgcatgttcattcattgctacataatttggttcttctggaatatttttatgtagctcttggagtacagctatgaaaattaacaactgttaaaggaaataccttttttttttttttgtaattttttccttgaagaaccaaagtattttttcagctggttgttgaatagggttaagtccgcttggattagctgtgcctttcattactttgttacagaaatgcagtgacttatactaagacaatttattgtttaaaaaaaaaattggcaagacaactatatggttaagaatttccagtatgaccacacccaataactgttattagagtgttaatggattattgtgttttaggtgacatagttaactgtaaagtaacctgactcagtatagttactggtaccacagtgaggtgaataaaacgggattttcagaagttagcctgaatttaactgtatttttaaatttaacctccattaactaagcatcttttctttgtggtagggtctaccttctgcttccctggaaaggatgaatttacatcatttgacaagcctattttcaagttatttgttgtttgtttgcttgtttttgtttttgcagctaaaataaaaatttcaaatacaattttagttcttacaagataatgtcttaattttgtaccaattcaggtagaagtagaggcctaccttgaattaagggttatactcagtttttaacacattgttgaagaaaaggtaccagctttggaacgagatgctatactaataagcaagtgtaaaaaaaaaaaaaaaagaggaagaaaatcttaagtgattgatgctgttttcttttaaaaaaaaaaaaaaaaattcattttctttgggttagagctagagagaaggccccaagcttctatggtttcttctaattcttattgcttaaagtatgagtatgtcacttacccgtgcttctgtttactgtgtaattaaaatgggtagtactgtttacctaactacctcatggatgtgttaaggcatattgagttaaatctcatataatgtttctcaatcttgttaaaagctcaaaattttgggcctatttgtaatgccagtgtgacactaagcattttgttcacaccacgctttgataactaaactggaaaacaaaggtgttaagtacctctgttctggatctgggcagtcagcactctttttagatctttgtgtggctcctatttttatagaagtggagggatgcactatttcacaaggtccaagatttgttttcagatatttttgatgactgtattgtaaatactacagggatagcactatagtattgtagtcatgagacttaaagtggaaataagactatttttgacaaaagatgccattaaatttcagactgtagagccacatttacaatacctcaggctaattactgttaattttggggttgaacttttttttgacagtgagggtggattattggattgtcattagaggaaggtctagatttcctgctcttaataaaattacattgaattgatttttagaggtaatgaaaacttcctttctgagaagttagtgttaaggtcttggaatgtgaacacattgtttgtagtgctatccattcctctcctgagattttaacttactactggaaatccttaaccaattataatagctttttttctttattttcaaaatgatttcctttgctttgattagacactatgtgctttttttttttaaccatagttcatcgaaatgcagctttttctgaacttcaaagatagaatcccatttttaatgaactgaagtagcaaaatcatctttttcattctttaggaaatagctattgccaaagtgaaggtgtagataatacctagtcttgttacataaaggggatgtggtttgcagaagaattttctttataaaattgaagttttaagggacgtcagtgtttatgccatttttccagttccaaaatgattccattccattctagaaatttgaagtatgtaacctgaaatccttaataaaatttggatttaattttataaaatgtactggtgatattttgggtgtttttttttaaatgaatgtatatactttttttttgaagagtggagagtagtgatgtctagagggagctattttgtgctgaggccactatgttctgtaaatatataattttaagagcaacctcacaatccctgctaagtggagtttattatttgaagactaaaatggaattccatagttcctgataggttatattctgggttattattctgagttatctacaaacatttttgagatttgtctttacactctgattgtagtttccagcagcccatgcacactgccaagtaagtctcattttttcctgttagaaatggtgaaatatcatataatcacttataaagaaaactgatatgaaaaaattttagagttgtttgctttatggtcactcaagtagggtaagtgttccacaaattccacaagttgatagtttaacatggatgtctgaaagccacatatataatttcttaggattcttaaattagtaaatctagcttactgaagcagtattagcatcactattttagattgcaaaaataccttaattgtgtggaactggcttgtagagtggtacttaagaaaaatgggattctacctctatttctgttttagcacacttaatcaggaaaggatatattaactttcataaaaatatttttgttgtgtgaataggttaatgatatggtaaggcccctaaaataactgaattaattgtttattgtaattgtaggccattcccattattaaaaataaagacaaaacttgaagtaactgaaaatcttatcgtgctatgtagaaatattgaactaatattcaaatatttgaatgctttggtttcagggattggtttaaaattggagtccttttttatgggttagtcttacaaaaatttaagcctttatatttttgactttaaatcaaaacaaatgttattttaaatgtacagaatagattggtagtgcagaagagtgtaagttcttcataggagctttagaaaagagaaatatgtgctaattcagtttttttttaatctgcactgtacatatatacttggtaattatgagcttgattttgtttttggaaatatgtgttcataatttaggtaatttgctacttaaagcactaagtctctgatacctgaaaagtacatgtaaatggtgatggtgaaataatactgcagttaacttaatagatgtatactggtgatttttgtatgctggattaaaactccagatattaaaatataacctggataaaaagcc

SEQ ID NO: 94 - DNA, 787 bp, Homo sapiens
  40S ribosomal protein S14 transcript variant 2, S14, emetine resistance (EMTB)
  CDS (268)...(723): RPS14
ctccgccccctcccactctctctttccggtgtggagtctggagacgacgtgcaggtaggaggcccgggcgcgacaatcggggggcatcctgcggcgaggggaccctgtggggcttgggacgagagacgggggtctttccgtgggaaccgagctaggtgccgggcaagagacgcgcggctggcccacctggatcctggccaactcgggattgagttcgttcctggtctcagaaggcccgttttgctttcagggaggagcttgtgaaaaatggcacctcgaaaggggaaggaaaagaaggaagaacaggtcatcagcctcggacctcaggtggctgaaggagagaatgtatttggtgtctgccatatctttgcatccttcaatgacacttttgtccatgtcactgatctttctggcaaggaaaccatctgccgtgtgactggtgggatgaaggtaaaggcagaccgagatgaatcctcaccatatgctgctatgttggctgcccaggatgtggcccagaggtgcaaggagctgggtatcaccgccctacacatcaaactccgggccacaggaggaaataggaccaagacccctggacctggggcccagtcggccctcagagcccttgcccgctcgggtatgaagatcgggcggattgaggatgtcacccccatcccctctgacagcactcgcaggaaggggggtcgccgtggtcgccgtctgtgaacaagattcctcaaaatattttctgttaataaattgccttcatgtaaactgtttcaaaaaaaaa

SEQ ID NO: 95 - DNA, 978 bp, Homo sapiens
  ethylmalonic encephalopathy 1 (ETHE1), persulfide dioxygenase ETHE1, mitochondrial, sulfur dioxygenase ETHE1, hepatoma subtracted clone one protein (HSCO), YF13H12, protein ETHE1, mitochondrial
  CDS (68)...(832): ETHE1
agtgccgtagcgcccggctcctgcaggcgctcggcctccgctcattcctgaccccgcagtgggcgcgatggcggaggctgtactgagggtcgcccggcggcagctgagccagcgcggcgggtctggagcccccatcctcctgcggcagatgttcgagcctgtgagctgcaccttcacgtacctgctgggtgacagagagtcccgggaggccgttctgatcgacccagtcctggaaacagcgcctcgggatgcccagctgatcaaggagctggggctgcggctgctctatgctgtgaatacccactgccacgcggaccacattacaggctcggggctgctccgttccctcctccctggctgccagtctgtcatctcccgccttagtggggcccaggctgacttacacattgaggatggagactccatccgcttcgggcgcttcgcgttggagaccagggccagccctggccacaccccaggctgtgtcaccttcgtcctgaatgaccacagcatggccttcactggagatgccctgttgatccgtgggtgtgggcggacagacttccagcaaggctgtgccaagaccttgtaccactcggtccatgaaaagatcttcacacttccaggagactgtctgatctaccctgctcacgattaccatgggttcacagtgtccaccgtggaggaggagaggactctgaaccctcggctcaccctcagctgtgaggagtttgtcaaaatcatgggcaacctgaacttgcctaaacctcagcagatagactttgctgttccagccaacatgcgctgtggggtgcagacacccactgcctgatctcacttctgtcagatgctcccatccactattaatgcactaggtgggaggagagggcggcaatgacactgcacctctcctttcccaccgcattccctggagctccctaaataaaactttttttaacgtgaaaaaaaaaaaaaaaa

SEQ ID NO: 96 - DNA, 1890 bp, Homo sapiens
  cyclin I (CCNI, CYC1, CYI), cyclin ITI
  CDS (545)...(1678): CCNI
cccgcgagcggacgcggcagcgcctctgtctcgctttttcttatttttcccccctttcccctttctttttttttttttcttttcttttctcccctccccccctttcaccatttcccctcggaggcgctttccccgggcaggggcagagccggtctcaccccccgcctctccccggcccccgccgccctatggcgagagggagccccctcccaacccgggctcgagcggcggcggcctcaggccgggggtcatcatggaactaattcgctgaccgacccagcggccgcagccgtgcgtcccgctcgagcgccagcgcccgcgcccgcgccccccgatccgcttcccctttctccctcctcagttggccgagtcgtcccgcgcgcaccgcctccgcgcgcctatgagaatgaggtggtaacgggcccccggatgaccccgcgtcaccactgtgaggcctacagctctgccggggaggaggaggaggaggaagaggaggagaaggtagctacagcaagctgggtagcaggcagatccaaaggatatcatgaagtttccagggcctttggaaaaccagagattgtctttcctgttggaaaaggcaatcactagggaagcacagatgtggaaagtgaatgtgcggaaaatgccttcaaatcagaatgtttctccatcccagagagatgaagtaattcaatggctggccaaactcaagtaccaattcaacctttacccagaaacatttgctctggctagcagtcttttggataggtttttagctaccgtaaaggctcatccaaaatacttgagttgtattgcaatcagctgttttttcctagctgccaagactgttgaggaagatgagagaattccagtactaaaggtattggcaagagacagtttctgtggatgttcctcatctgaaattttgagaatggagagaattattctggataagttgaattgggatcttcacacagccacaccattggattttcttcatattttccatgccattgcagtgtcaactaggcctcagttacttttcagtttgcccaaattgagcccatctcaacatttggcagtccttaccaagcaactacttcactgtatggcctgcaaccaacttctgcaattcagaggatccatgcttgctctggccatggttagtctggaaatggagaaactcattcctgattggctttctcttacaattgaactgcttcagaaagcacagatggatagctcccagttgatccattgtcgggagcttgtggcacatcacctttctactctgcagtcttccctgcctctgaattccgtttatgtctaccgtcccctcaagcacaccctggtgacctgtgacaaaggagtgttcagattacatccctcctctgtcccaggcccagacttctccaaggacaacagcaagccagaagtgccagtcagaggtacagcagccttttaccatcatctcccagctgccagtgggtgcaagcagacctctactaaacgcaaagtagaggaaatggaagtggatgacttctatgatggaatcaaacggctctataatgaagataatgtctcagaaaatgtgggttctgtgtgtggcactgatttatcaagacaagagggacatgcttccccttgtccacctttgcagcctgtttctgtcatgtagtttcaacaagtgctacctttgagtgtaaactaaggtagactactttgggaatgagaacatgcaaaatcaggaaaggctgtagaaggaaatataccttaacaggctgatttggagtgagccagaaaaaaaaaataaaactctcattatttgtgtggctaattataattcagcgttatttaagcacataaagaccaaaaaaaaaaaaaaaaaaa

SEQ ID NO: 97 - DNA, 2856 bp, Homo sapiens
  metastasis associated 1 transcript variant 1 (MTA1), metastasis-associated protein MTA1 isoform MTA1
  CDS (188)...(2335): MTA1
gcggccctcccgtccctgcgcggcctcggcggcctcggcggcggcggcggcggcggcggcggcagcagcgcggcccctttaaacgcctgcggcgccccccgcccccgccatcgcgcctccattttcccggccgcccgcgccgagcgccgcgcccgccccgggcccctccgccgccgccggcccggacatggccgccaacatgtacagggtcggagactacgtctactttgagaactcctccagcaacccatacctgatccggagaatcgaggagctcaacaagacggccaatgggaacgtggaggccaaagtggtgtgcttctaccggaggcgggacatctccagcaccctcatcgccctggccgacaagcacgcaaccctgtcagtctgctataaggccggaccgggggcggacaacggcgaggaaggggaaatagaagaggaaatggagaatccggaaatggtggacctgcccgagaaactaaagcaccagctgcggcatcgggagctgttcctctcccggcagctggagtctctgcccgccacgcacatcaggggcaagtgcagcgtcaccctgctcaacgagaccgagtcgctcaagtcctacctggagcgggaggatttcttcttctattctctagtctacgacccacagcagaagaccctgctggcagataaaggagagattcgagtaggaaaccggtaccaggcagacatcaccgacttgttaaaagaaggcgaggaggatggccgagaccagtccaggttggagacccaggtgtgggaggcgcacaacccactcacagacaagcagatcgaccagttcctggtggtggcccgctctgtgggcaccttcgcacgggccctggactgcagcagctccgtccgacagcccagcctgcacatgagcgccgcagctgcctcccgagacatcaccctgttccacgccatggatactctccacaagaacatctacgacatctccaaggccatctcggcgctggtgccgcagggcgggcccgtgctctgcagggacgagatggaggagtggtctgcatcagaggccaaccttttcgaggaagccctggaaaaatatgggaaggatttcacggacattcagcaagattttctcccgtggaagtcgctgaccagcatcattgagtactactacatgtggaagaccaccgacagatacgtgcagcagaaacgcttgaaagcagctgaagctgagagcaagttaaagcaagtttatattcccaactataacaagccaaatccgaaccaaatcagcgtcaacaacgtcaaggccggtgtggtgaacggcacgggggcgccgggccagagccctggggctggccgggcctgcgagagctgttacaccacacagtcttaccagtggtattcttggggtccccctaacatgcagtgtcgtctctgcgcatcttgttggacatattggaagaaatatggtggcttgaaaatgccaacccggttagatggagagaggccaggaccaaaccgcagtaacatgagtccccacggcctcccagcccggagcagcgggagccccaagtttgccatgaagaccaggcaggctttctatctgcacacgacgaagctgacgcggatcgcccggcgcctgtgccgtgagatcctgcgcccgtggcacgctgcgcggcacccctacctgcccatcaacagcgcggccatcaaggccgagtgcacggcgcggctgcccgaagcctcccagagcccgctggtgctgaagcaggcggtacgcaagccgctggaagccgtgcttcggtatcttgagacccacccccgcccccccaagcctgaccccgtgaaaagcgtgtccagcgtgctcagcagcctgacgcccgccaaggtggcccccgtcatcaacaacggctcccccaccatcctgggcaagcgcagctacgagcagcacaacggggtggacggcaacatgaagaagcgcctcttgatgcccagtaggggtctggcaaaccacggacaggccaggcacatgggaccaagccggaacctcctgctcaacgggaagtcctaccccaccaaagtgcgcctgatccgggggggctccctgcccccagtcaagcggcggcggatgaactggatcgacgccccggatgacgtgttctacatggccacagaggagaccaggaagatccgcaagctgctctcatcctcggaaaccaagcgtgctgcccgccggccctacaagcccatcgccctgcgccagagccaggccctgccgccgcggccaccgccacctgcgcccgtcaacgacgagcccatcgtcatcgaggactaggggccgcccccacctgcggccgccccccgcccctcgcccgcccacacggccccttcccagccagcccgccgcccgcccctcagtttggtagtgccccacctcccgccctcacctgcagagaaacgcgctccttggcggacactgggggaggagaggaagaagcgcggctaacttattccgagaatgccgaggagttgtcgtttttagctttgtgtttactttttggctggagcggagatgaggggccaccccgtgcccctgtgctgcggggccttttgcccggaggccgggccctaaggttttgttgtgttctgttgaaggtgccattttaaattttatttttattactttttttgtagatgaacttgagctctgtaacttacacctggaatgttaggatcgtgcggccgcggccggccgagctgcctggcggggttggcccttgtcttttcaagtaattttcatattaaacaaaaacaaagaaaaaaaatcttataaaaaggaaaaaaaaaaaaaaaaaa

SEQ ID NO: 98 - DNA, 1286 bp, Homo sapiens
  eukaryotic translation initiation factor 3, subunit H (EIF3H), eukaryotic translation initiation factor 3, subunit 3 gamma, 40kDa (eIF3-gamma, eIF3-p40), eukaryotic translation initiation factor 3, subunit 2 (beta, 36kD)
  CDS (27)...(1085): EIF3H
ctctttcttcctgtctgcttggaaagatggcgtcccgcaaggaaggtaccggctctactgccacctcttccagctccaccgccggcgcagcagggaaaggcaaaggcaaaggcggctcgggagattcagccgtgaagcaagtgcagatagatggccttgtggtattaaagataatcaaacattatcaagaagaaggacaaggaactgaagttgttcaaggagtgcttttgggtctggttgtagaagatcggcttgaaattaccaactgctttcctttccctcagcacacagaggatgatgctgactttgatgaagtccaatatcagatggaaatgatgcggagccttcgccatgtaaacattgatcatcttcacgtgggctggtatcagtccacatactatggctcattcgttacccgggcactcctggactctcagtttagttaccagcatgccattgaagaatctgtcgttctcatttatgatcccataaaaactgcccaaggatctctctcactaaaggcatacagactgactcctaaactgatggaagtttgtaaagaaaaggatttttcccctgaagcattgaaaaaagcaaatatcacctttgagtacatgtttgaagaagtgccgattgtaattaaaaattcacatctgatcaatgtcctaatgtgggaacttgaaaagaagtcagctgttgcagataaacatgaattgctcagccttgccagcagcaatcatttggggaagaatctacagttgctgatggacagagtggatgaaatgagccaagatatagttaaatacaacacatacatgaggaatactagtaaacaacagcagcagaaacatcagtatcagcagcgtcgccagcaggagaatatgcagcgccagagccgaggagaacccccgctccctgaggaggacctgtccaaactcttcaaaccaccacagccgcctgccaggatggactcgctgctcattgcaggccagataaacacttactgccagaacatcaaggagttcactgcccaaaacttaggcaagctcttcatggcccaggctcttcaagaatacaacaactaagaaaaggaagtttccagaaaagaagttaacatgaactcttgaagtcacaccagggcaactcttggaagaaatatatttgcatattgaaaagcacagaggatttctttagtgtcattgccgattttggctataacagtgtctttctagccataataaaataaaacaaaatcttgactgcttgctcatttgaaaaaaaaaaaa

SEQ ID NO: 99 - DNA, 766 bp, Homo sapiens
  60S ribosomal protein L9 transcript variant 1, L9, NPC-A-16
  CDS (60)...(638): RPL9
acgcgatacaagtacgtaatgacgacagacgttctttctttgctgcgtctactgcgagaatgaagactattctcagcaatcagactgtcgacattccagaaaatgtcgacattactctgaagggacgcacagttatcgtgaagggccccagaggaaccctgcggagggacttcaatcacatcaatgtagaactcagccttcttggaaagaaaaaaaagaggctccgggttgacaaatggtggggtaacagaaaggaactggctaccgttcggactatttgtagtcatgtacagaacatgatcaagggtgttacactgggcttccgttacaagatgaggtctgtgtatgctcacttccccatcaacgttgttatccaggagaatgggtctcttgttgaaatccgaaatttcttgggtgaaaaatatatccgcagggttcggatgagaccaggtgttgcttgttcagtatctcaagcccagaaagatgaattaatccttgaaggaaatgacattgagcttgtttcaaattcagcggctttgattcagcaagccacaacagttaaaaacaaggatatcaggaaatttttggatggtatctatgtctctgaaaaaggaactgttcagcaggctgatgaataagatctaagagttacctggctacagaaagaagatgccagatgacacttaagacctacttgtgatatttaaatgatgcaataaaagacctattgatttggaccttcttcttaaaaaaaaaaaaaaaaaaa

SEQ ID NO: 100 - DNA, 3325 bp, Homo sapiens
  40S ribosomal protein S23, S23, homolog of yeast ribosomal protein S28
  CDS (94)...(525): RPS23
ggggtccttggctgggcggggcttgctcgcggtggcttgtggctccttcctgcggtgcttctctctttcgctcaggcccgtggcgccgacaggatgggcaagtgtcgtggacttcgtactgctaggaagctccgtagtcaccgacgagaccagaagtggcatgataaacagtataagaaagctcatttgggcacagccctaaaggccaacccttttggaggtgcttctcatgcaaaaggaatcgtgctggaaaaagtaggagttgaagccaaacagccaaattctgccattaggaagtgtgtaagggtccagctgatcaagaatggcaagaaaatcacagcctttgtacccaatgacggttgcttgaactttattgaggaaaatgatgaagttctggttgctggatttggtcgcaaaggtcatgctgttggtgatattcctggagtccgctttaaggttgtcaaagtagccaatgtttctcttttggccctatacaaaggcaagaaggaaagaccaagatcataaatattaatggtgaaaacactgtagtaataaattttcatatgccaaaaaatgtttgtatcttactgtcccctgttctcaccacgaagatcatgttcattaccaccaccacccccccttattttttttatcctaaaccagcaaacgcaggacctgtaccaattttaggagacaataagacagggttgtttcaggattctctagagttaataacatttgtaacctggcacagtttccctcatcctgtggaataagaaaatgggatagatctggaataaatgtgcagtattgtagtattactttaagaactttaagggaacttcaaaaactcactgaaattctagtgagatactttcttttttattcttggtattttccatatcgggtgcaacacttcagttaccaaatttcattgcacatagattatcttaggtacccttggaaatgcacattcttgtatccatcttacaggggcccaagatgataaatagtaaactcaaaattgctccccactctgtttattatttaaaggtgtcaggatctgtgttgtaatgtgtctacattaatgtgtttaggagaatacaggcattggatcatttagttgatggaagtatatgccaggcaagggagataaggtatacgacaagactgatgttttcagtatcttctcatgaggttgtcagagaccttcatgtcttcaaagactagtcagcaaatgaagtggtttagtgtagagacaagattggttgtgttttgataatttaagctaggtattgagtacatgtggattttgctgtccacaaatacttgtttcagagttttcatggatacagtggcatggttgaaatgaagctgtgagccttctgctttaaatctgatgtaagaaactcctgttaacaaatagtaagtatgggttaattagccctttgatcaaagcctagctttacattgtttaggatctttggaaaacaattggtttggttgcccactttccgtaggatcaagagcagaacctttcacatggcacagaagaacccaggttgcgcttcatacctgcatattccagccttagcctgccatttctctccttggcactttgtgctccagcaacactggtctcagttggtcatcctcaaacttgggttccatatccagcctcaggacctctgttcctgttactatggttccttgcatgtcgcctgctcttactaaagagctcgtgtgttttccagcacacttcggtttatctcttgatgatgatgctagtctctccctccgcaagggcggaaaggctgcctgttggtttgtaccagtgtttcctaacgtgtagctgcagtcagtatttggctaagctgttcccaggggctcaacagatgctttcggatgagccttaactgacccaatcctttgtgatgcgggagagattgctaggcctcgctcacctggccagaaccagggaaagaggccgcggttgcagcgcgattccaggccctgggcgtcaggcgcggggtgggcagctctccccgggcggtggggcccttgtgaccgcgaggcggggcgcaccaggaagggagtgggacagcgcgggcgcccagggatgtggcctggttacctgccttctctgatacgtcaagacaccttcaacaatggcttgcagctgtaccctgttggctgcacccaggacgcccttttcactgctaagcagtcctacctgaggcccaggggctgccagattgacccataaataatctccggcgcctcagatccagaagctgctgagcctgatcttagtgccttctcctttctctgtgtggccccccagcccctttccccactgccttgtgtccaaggccctttccttcatgtatccatggaggagagacaaaaatacacatcaataaaataagatagggaatccataaatagacattcagaagtatggccaacggatttatcttaaaaccaatggaggaagaagagtttcaataaatgttgtggacttccatttgtcaaagaccaaaacaaaggaaccccaaccttacatgtaatacaaacttaactcaaaatggatcatatatctaaatgtaaaatggaaagctataaaactgaaaacagactatctttacaacctaggcgtaggtatagtttttagacattacaccaaaagcacatgccgtaaaagaaaaaatagataaattggtggatttcattaaaattaaaaaactttttctctctgaaaaatcctgttaagctgggcgctgtggttcatgcctgtaatcccagcactttgggaggctgagttgggaagaaattaatagcttgaggccaggagttcaagatcatcctgggcagcaaagtcatacactcttgagggaagagagagaccttctcatattgttttatattgttttatactcagtacctgttttaagaaaaaaacaaggaagtgaaatcaaagacaggcagcccggcaccaggcctgaaaccagccctgggcctgcctggcctaaacctagtagttaaaaatcaacttacgacttagaacctgatgttatccgtagattccaagcattgtataaaaaaattgtgaaactccctgttgtgttctgtaccagtgcatgaaacccctgtcacatatcccctagattgctcaatcaatcacgaccctttcatgtgaaatctttagtgttgtgagcccttaaaagggacagaaattgtgcacttgaggagctcagattttaaggctgtagcttgccgatgctcccagctgaataaagcccttccttctacaaaaaaaaaaaaa

SEQ ID NO: 101 - DNA, 829 bp, Homo sapiens
  40S ribosomal protein S6, S6, phosphoprotein NP33
  CDS (43)...(792): RPS6
cctcttttccgtggcgcctcggaggcgttcagctgcttcaagatgaagctgaacatctccttcccagccactggctgccagaaactcattgaagtggacgatgaacgcaaacttcgtactttctatgagaagcgtatggccacagaagttgctgctgacgctctgggtgaagaatggaagggttatgtggtccgaatcagtggtgggaacgacaaacaaggtttccccatgaagcagggtgtcttgacccatggccgtgtccgcctgctactgagtaaggggcattcctgttacagaccaaggagaactggagaaagaaagagaaaatcagttcgtggttgcattgtggatgcaaatctgagcgttctcaacttggttattgtaaaaaaaggagagaaggatattcctggactgactgatactacagtgcctcgccgcctgggccccaaaagagctagcagaatccgcaaacttttcaatctctctaaagaagatgatgtccgccagtatgttgtaagaaagcccttaaataaagaaggtaagaaacctaggaccaaagcacccaagattcagcgtcttgttactccacgtgtcctgcagcacaaacggcggcgtattgctctgaagaagcagcgtaccaagaaaaataaagaagaggctgcagaatatgctaaacttttggccaagagaatgaaggaggctaaggagaagcgccaggaacaaattgcgaagagacgcagactttcctctctgcgagcttctacttctaagtctgaatccagtcagaaataagattttttgagtaacaaataaataagatcagactctg

SEQ ID NO: 102 - DNA, 745 bp, Homo sapiens
  60S ribosomal protein S7, S7, DBA8
  CDS (107)...(691): RPS7
gcgctgtttccgcctcttgccttcggacgccggattttgacgtgctctcgcgagatttgggtctcttcctaagccggcgctcggcaagttctcccaggagaaagccatgttcagttcgagcgccaagatcgtgaagcccaatggcgagaagccggacgagttcgagtccggcatctcccaggctcttctggagctggagatgaactcggacctcaaggctcagctcagggagctgaatattacggcagctaaggaaattgaagttggtggtggtcggaaagctatcataatctttgttcccgttcctcaactgaaatctttccagaaaatccaagtccggctagtacgcgaattggagaaaaagttcagtgggaagcatgtcgtctttatcgctcagaggagaattctgcctaagccaactcgaaaaagccgtacaaaaaataagcaaaagcgtcccaggagccgtactctgacagctgtgcacgatgccatccttgaggacttggtcttcccaagcgaaattgtgggcaagagaatccgcgtcaaactagatggcagccggctcataaaggttcatttggacaaagcacagcagaacaatgtggaacacaaggttgaaactttttctggtgtctataagaagctcacgggcaaggatgttaattttgaattcccagagtttcaattgtaaacaaaaatgactaaataaaaagtatatattcacagtaaaaaaaaaaaaaaaaaa

SEQ ID NO: 103 - DNA, 748 bp, Homo sapiens
  60S ribosomal protein L19, L19
  CDS (63)...(653): RPL19
gcagataatgggaggagccgggcccgagcgagctctttcctttcgctgctgcggccgcagccatgagtatgctcaggcttcagaagaggctcgcctctagtgtcctccgctgtggcaagaagaaggtctggttagaccccaatgagaccaatgaaatcgccaatgccaactcccgtcagcagatccggaagctcatcaaagatgggctgatcatccgcaagcctgtgacggtccattcccgggctcgatgccggaaaaacaccttggcccgccggaagggcaggcacatgggcataggtaagcggaagggtacagccaatgcccgaatgccagagaaggtcacatggatgaggagaatgaggattttgcgccggctgctcagaagataccgtgaatctaagaagatcgatcgccacatgtatcacagcctgtacctgaaggtgaaggggaatgtgttcaaaaacaagcggattctcatggaacacatccacaagctgaaggcagacaaggcccgcaagaagctcctggctgaccaggctgaggcccgcaggtctaagaccaaggaagcacgcaagcgccgtgaagagcgcctccaggccaagaaggaggagatcatcaagactttatccaaggaggaagagaccaagaaataaaacctcccactttgtctgtacatactggcctctgtgattacatagatcagccattaaaataaaacaagccttaatctgcaaaaaaaaaaaaaaaa

SEQ ID NO: 104 - DNA, 1458 bp, Homo sapiens
  60S ribosomal protein L4, L4, ribosomal protein L1
  CDS (66)...(1349): RPL4
aagcacttccttttcctgtggcagcagccgggctgagaggagcgtggctgtctcctctctccgccatggcgtgtgctcgcccactgatatcggtgtactccgaaaagggggagtcatctggcaaaaatgtcactttgcctgctgtattcaaggctcctattcgaccagatattgtgaactttgttcacaccaacttgcgcaaaaacaacagacagccctatgctgtcagtgaattagcaggtcatcagactagtgctgagtcttggggtactggcagagctgtggctcgaattcccagagttcgaggtggtgggactcaccgctctggccagggtgcttttggaaacatgtgtcgtggaggccgaatgtttgcaccaaccaaaacctggcgccgttggcatcgtagagtgaacacaacccaaaaacgatacgccatctgttctgccctggctgcctcagccctaccagcactggtcatgtctaaaggtcatcgtattgaggaagttcctgaacttcctttggtagttgaagataaagttgaaggctacaagaagaccaaggaagctgttttgctccttaagaaacttaaagcctggaatgatatcaaaaaggtctatgcctctcagcgaatgagagctggcaaaggcaaaatgagaaaccgtcgccgtatccagcgcaggggcccgtgcatcatctataatgaggataatggtatcatcaaggccttcagaaacatccctggaattactctgcttaatgtaagcaagctgaacattttgaagcttgctcctggtgggcatgtgggacgtttctgcatttggactgaaagtgctttccggaagttagatgaattgtacggcacttggcgtaaagccgcttccctcaagagtaactacaatcttcccatgcacaagatgattaatacagatcttagcagaatcttgaaaagcccagagatccaaagagcccttcgagcaccacgcaagaagatccatcgcagagtcctaaagaagaacccactgaaaaacttgagaatcatgttgaagctaaacccatatgcaaagaccatgcgccggaacaccattcttcgccaggccaggaatcacaagctccgggtggataaggcagctgctgcagcagcggcactacaagccaaatcagatgagaaggcggcggttgcaggcaagaagcctgtggtaggtaagaaaggaaagaaggctgctgttggtgttaagaagcagaagaagcctctggtgggaaaaaaggcagcagctaccaagaaaccagcccctgaaaagaagcctgcagagaagaaacctactacagaggagaagaagcctgctgcataaactcttaaatttgattattccataaaggtcaaatcattttggacagcttcttttgaataaagacctgattatacaggcagtgagaaacatgaaaaaaaaaaaaaaaaaa

SEQ ID NO: 105 - DNA, 529 bp, Homo sapiens
  40S ribosomal protein S13, S13
  CDS (33)...(488): RPS13
cgctctcctttcgttgcctgatcgccgccatcatgggtcgcatgcatgctcccgggaagggcctgtcccagtcggctttaccctatcgacgcagcgtccccacttggttgaagttgacatctgacgacgtgaaggagcagatttacaaactggccaagaagggccttactccttcacagatcggtgtaatcctgagagattcacatggtgttgcacaagtacgttttgtgacaggcaataaaattttaagaattcttaagtctaagggacttgctcctgatcttcctgaagatctctaccatttaattaagaaagcagttgctgttcgaaagcatcttgagaggaacagaaaggataaggatgctaaattccgtctgattctaatagagagccggattcaccgtttggctcgatattataagaccaagcgagtcctccctcccaattggaaatatgaatcatctacagcctctgccctggtcgcataaatttgtctgtgtactcaagcaataaaatgattgtttaacta

SEQ ID NO: 106 - DNA, 2836 bp, Homo sapiens
  GC-rich sequence DNA-binding factor 1 (GCFC, GCFC1), chromosome 21 open reading frame 66 (C21orf66), PAX3 and PAX7 binding protein 1 transcript variant 2 (PAXBP1), functional spliceosome-associated protein 105 (FSAP105), BM020
  CDS (191)...(2638): C21orf66
ctctctctctttctccaagtattgagagcgcgtgggagcataggcgcatgcgcgctcgtggggtgcgcggtagcaacagaggactcgacccggctggagctccggagagcgcgcgtgcgccgtcacgagctcggcgctgccggggccgcggtgtggaagcgagtattcgaccgccgtgcgggccgcggggatgttccgaaaggcccggcgggtgaacgtgcgcaagcggaacgactccgaagaggaagagcgggaacgcgatgaggagcaggagccgccgccgttgttgccgccgccgggcacgggcgaagaggcgggccccggtggcggcgacagggcccctggcggggagtcgctgctgggcccggggccgtcgccgccttccgcgctgaccccgggcctcggggctgaggccgggggcggcttccccggcggcgcggagcccggcaacgggctgaagccgcgcaagaggcctcgcgagaacaaagaggtgccccgggccagcctgctcagcttccaggacgaggaggaagaaaatgaagaagttttcaaagtgaagaaatcaagttatagcaaaaagatagtaaaattgctcaagaaggaatataaagaagatcttgaaaaatcgaagattaagacagaactcaactcatcagctgaaagtgaacaacctttggacaaaacaggacatgttaaggatacaaatcaagaagatggagttatcatcagtgaacatggtgaagatgaaatggatatggaaagtgaaaaagaggaagaaaagccaaagactggtggagctttttcaaatgctttatcttcattgaatgttcttcgtccaggagaaattccagatgcagcttttatacatgctgcaaggaaaaagcgccaaatggcccgagaattgggagatttcactcctcatgataatgagcctggtaaaggccgccttgttagagaagatgagaatgatgccagtgatgatgaagatgacgatgagaaacgccggatagttttttctgtgaaagaaaagtcacaaagacaaaaaattgctgaggaaataggaattgaggggagtgatgatgatgctttagtaactggagaacaggatgaagagctcagccgatgggaacaggagcagataaggaaaggaattaatatccctcaggttcaagccagtcaacccgcagaagtgaatatgtactaccagaacacttaccagacaatgccttacggctcatcctatggcattccttatagttatacggcctatggatcatcagatgccaaatctcaaaaaacagataatacagtccctttcaaaactcccagtaatgagatgactcccgttactattgatttggtaaagaaacagcttaaagacaggttggactccatgaaagaattgcacaaaacaaatcgacagcagcatgagaaacatctgcaaagccgagtggactctaccagggctattgaaagattagaagggtcttctgggggtattggtgaacggtataaatttttgcaagaaatgcgagggtatgtccaagacttgcttgagtgtttcagtgaaaaggtgccactgattaatgaacttgaatcagcaatacatcagctgtacaaacagcgagcttcccgccttgtccaaagacgacaagatgatattaaagatgaatcttcggagttttcaagccattcaaacaaagctctgatggcaccaaatcttgactcctttggacgcgatcgggcactgtatcaagagcatgcaaaacgtcgcattgcagagcgggaggccaggaggactcgtcgtagacaagccagagaacaaaccggtaagatggcagatcaccttgaaggcctttccagtgatgatgaagaaacttctacagatattactaatttcaatctggaaaaagatcgaatttcaaaagaatccggcaaagtttttgaagatgtccttgaaagtttctattcaattgactgtattaaatcacagtttgaagcatggcgttcaaaatactacacatcctacaaagatgcttacattggcctttgtttgccaaaattattcaaccccctcatacgacttcagctcctcacttggactcctcttgaggcaaaatgtcgtgactttgagaatatgctgtggtttgaatctttgctgttttatggttgtgaagaacgagagcaagaaaaagatgatgtagatgttgccctactacctaccattgtggaaaaggtgattcttcctaaactaacagtgatagctgaaaatatgtgggaccctttttctacaacacagacttcaagaatggtgggaattacactaaaattaatcaatggatatccttcagtagtgaatgcagaaaataaaaatacacaggtatacctaaaggcacttttattgagaatgagaagaactttagatgatgatgtatttatgcccttatatcccaaaaatgtcttagaaaataaaaattctgggccttacttgttttttcaacgacagttttggtcttcagttaaggtcataaaacccccattccagagagggtcctgccccatacccagaaggaaagaatgctgctcagagaggccaagaagaatctggacggacaggccttgtgttgtcttctcttgagcagtagatcatacctttttgtccagtcatgtttctgcatgcctgtacatatttcgttaaacctaaacatagtagacaatttctcctccatctttgggtcttcattctgaaggctgtcatgttacataaaactgtgatcaaataaatttatatgccttttctcctgttaaaaaaaaaaaaaaaaaaaaaaaaaaaaaa

SEQ ID NO: 107 - DNA, 1374 bp, Homo sapiens
  leucine carboxyl methyltransferase 1 transcript variant 1 (LCMT1, LCMT), protein phosphatase methyltransferase 1 (PPMT1), protein-leucine O-methyltransferase,[phosphatase 2A protein]-leucine-carboxy methyltransferase 1, CGI-68
  CDS (159)...(1163): LCMT1
agccggcgtgggcggcgtcactgagccgcgccagctgagccaggtagggccctaccctcttctgttgctttctccctgtggctcgcgccgtcccccgccgcccgtcgaccccgcttccatgtccctggcggacacagctcccaggaacctccacgcccatggccactaggcagagggaatcctctatcacctcctgctgttccacctcgagctgcgacgcagacgacgagggcgtgcgcggcacctgcgaagatgcttccctgtgcaagaggtttgcagtaagcattggctactggcatgacccttacatacagcactttgtgagactgtctaaagagaggaaagcccctgaaatcaacagaggatattttgctcgagtccatggtgtcagtcagcttataaaggcatttctacggaagacagaatgtcattgtcaaattgtcaaccttggggcaggcatggataccaccttctggagattaaaggatgaagatcttctcccaagtaaatattttgaggttgactttccaatgattgtcacgagaaagctgcacagtatcaaatgcaagcctcccctatccagccccattctagaactgcattcagaggacacacttcagatggatggacacatactggattcaaagagatatgccgttattggagcagatctccgagacctgtctgaactggaagagaagctaaagaaatgtaacatgaatacacaattgccaacactcctgatagctgaatgtgtgctggtttacatgactccagagcagtccgcaaacctcctgaagtgggcagccaacagttttgagagagccatgttcataaactacgaacaggtgaacatgggtgatcggtttgggcagatcatgattgaaaacctgcggagacgccagtgtgacctggcgggagtggagacctgcaagtcattagagtcacagaaagaacggctcctgtcgaatgggtgggaaacagcatcggccgtcgacatgatggagttgtacaacaggttacctcgagctgaagtgagcaggatagaatcacttgaattcctggatgaaatggagctgctggagcagctcatgcggcattactgcctttgctgggcaaccaaaggaggaaatgagcttgggctgaaggagataacttattaatctgtcgaaggcttatgccgagccagaagccgaagccacttgccctcctggaggagacctgcaagctccctgagcggtgggcgggcctcgtccgcaggtctcatcccacactcttgagaagccttggtcactacagtggtcgcacatgttcctcttcctgttcctgttgacatgtcgttgtttaaataaatctcacttgccaccagtaaaa

SEQ ID NO: 108 - DNA, 2091 bp, Homo sapiens
  eukaryotic translation initiation factor 3, subunit L transcript variant 1 (EIF3L), eukaryotic translation initiation factor 3 subunit 6-interacting protein (EIF3S6IP), eukaryotic translation initiation factor 3 subunit E-interacting protein (EIF3EIP)
  CDS (79)...(1773): EIF3L
gctgaacttccggcctcaggacgcaggcgcgggccgctcatttcgctctttccggcggtgctcgcaagcgaggcagccatgtcttatcccgctgatgattatgagtctgaggcggcttatgacccctacgcttatcccagcgactatgatatgcacacaggagatccaaagcaggaccttgcttatgaacgtcagtatgaacagcaaacctatcaggtgatccctgaggtgatcaaaaacttcatccagtatttccacaaaactgtctcagatttgattgaccagaaagtgtatgagctacaggccagtcgtgtctccagtgatgtcattgaccagaaggtgtatgagatccaggacatctatgagaacagctggaccaagctgactgaaagattcttcaagaatacaccttggcccgaggctgaagccattgctccacaggttggcaatgatgctgtcttcctgattttatacaaagaattatactacaggcacatatatgccaaagtcagtgggggaccttccttggagcagaggtttgaatcctattacaactactgcaatctcttcaactacattcttaatgccgatggtcctgctccccttgaactacccaaccagtggctctgggatattatcgatgagttcatctaccagtttcagtcattcagtcagtaccgctgtaagactgccaagaagtcagaggaggagattgactttcttcgttccaatcccaaaatctggaatgttcatagtgtcctcaatgtccttcattccctggtagacaaatccaacatcaaccgacagttggaggtatacacaagcggaggtgaccctgagagtgtggctggggagtatgggcggcactccctctacaaaatgcttggttacttcagcctggtcgggcttctccgcctgcactccctgttaggagattactaccaggccatcaaggtgctggagaacatcgaactgaacaagaagagtatgtattcccgtgtgccagagtgccaggtcaccacatactattatgttgggtttgcatatttgatgatgcgtcgttaccaggatgccatccgggtcttcgccaacatcctcctctacatccagaggaccaagagcatgttccagaggaccacgtacaagtatgagatgattaacaagcagaatgagcagatgcatgcgctgctggccattgccctcacgatgtaccccatgcgtattgatgagagcattcacctccagctgcgggagaaatatggggacaagatgttgcgcatgcagaaaggtgacccacaagtctatgaagaacttttcagttactcctgccccaagttcctgtcgcctgtagtgcccaactatgataatgtgcaccccaactaccacaaagagcccttcctgcagcagctgaaggtgttttctgatgaagtacagcagcaggcccagctttcaaccatccgcagcttcctgaagctctacaccaccatgcctgtggccaagctggctggcttcctggacctcacagagcaggagttccggatccagcttcttgtcttcaaacacaagatgaagaacctcgtgtggaccagcggtatctcagccctggatggtgaatttcagtcagcctcagaggttgacttctacattgataaggacatgatccacatcgcggacaccaaggtcgccaggcgttatggggatttcttcatccgtcagatccacaaatttgaggagcttaatcgaaccctgaagaagatgggacagagaccttgatgatattcacacacattcaggaacctgttttgatgtattataggcaggaagtgtttttgctaccgtgaaacctttacctagatcagccatcagcctgtcaactcagttaacaagttaaggaccgaagtgtttcaagtggatctcagtaaaggatctttggagccagatttgtcgtctcattattgtaggagagaatttgtgggttgtggcagtaatacatttcccatgtgtcctgatgctttcaggatacatcagttgttagtgtttaaattgagttatttttattttgtgcttttgagatggagtctcactctgtct

SEQ ID NO: 109 - DNA, 6209 bp, Homo sapiens
  importin 7 (IPO7, Imp7), RAN-binding protein 7 (RANBP7)
  CDS (143)...(3259): IPO7
gttctatccggggccttggcgcttctctttcctttcgcgccggttgccgctgcggagcgcggcgggtccatgtgcgcagtgagtggcgctattcctggcccagtagcacccgagccccgggtttgaccgagtccgcgctgcgatggaccccaacaccattatcgaggccctgcggggcaccatggacccagccctgcgtgaggccgcggagcgccagctcaatgaagcacacaagtctctgaattttgtctcaacactgctccagattactatgtcggaacagctggatttacctgtgagacaggcaggtgttatctatctgaaaaatatgataacacagtattggcctgatcgagaaacagcaccaggggatatatccccttatactattccagaagaagatcgccattgtattcgagaaaatattgtagaagccattatccattctcctgagctcatcagggtacagcttactacatgcattcatcacatcatcaaacatgattatccaagccgctggactgccattgtggacaaaattggcttttatcttcagtccgataacagtgcttgttggctaggaattcttctttgcctttatcagcttgtgaaaaattatgagtataaaaaaccagaggagcggagtccattggtagcagcaatgcagcattttctgccagttctaaaggatcgttttatccagcttctttctgaccagtctgatcagtctgtcctcatccagaaacagatattcaagatcttctatgctcttgttcagtatacactaccactggaactgataaaccaacagaacctgacagaatggatagaaattttaaagactgttgtgaacagggatgtacctaatgaaacacttcaagttgaagaagatgatcgacctgagttaccatggtggaaatgcaagaagtgggccttacatattttagcaagactttttgaaagatatggaagccctggcaatgtttccaaggagtataatgaatttgctgaagtatttctgaaggcatttgctgttggtgtccagcaagttttattgaaggtgttatatcagtacaaggagaagcaatatatggctcctcgagttttacaacagacattaaattatattaatcaaggagtttctcatgctctcacctggaagaatctgaagccccatatacaaggcattatccaagatgttatttttccattgatgtgctatacagatgctgatgaggaactttggcaagaagacccttacgaatatatacgcatgaagtttgatgtgtttgaagatttcatttctcctaccactgctgcccagacacttttgtttacagcctgtagtaagaggaaagaggtactgcaaaagactatgggattttgttaccagattcttacagaaccaaatgctgaccctcgaaaaaaagatggagccctgcatatgattggctctttagctgaaatacttctgaagaaaaagatctataaagatcagatggaatacatgttgcagaatcatgtattccctctcttcagcagtgaactaggctacatgagagcaagggcttgctgggtacttcactatttttgtgaagtgaagttcaaaagtgatcagaaccttcaaacagccttagagctaacaagaagatgtctgattgatgatagagaaatgcctgtgaaagtggaagctgccattgcccttcaagtattgatcagcaatcaagaaaaagctaaagaatatatcacaccattcatcagacctgtaatgcaggctcttcttcacattataagagaaacagaaaatgatgaccttaccaatgtaattcagaaaatgatctgtgaatatagtgaagaagttactcctattgcagtagaaatgacacaacatttggcaatgacatttaaccaagtaatccagacggggccagatgaagaaggtagtgatgacaaagcagttactgctatgggaattctgaatacaattgatacacttcttagtgtagttgaagatcataaagagataacccaacagcttgagggaatctgcttacaggtcattggtactgttttacaacagcatgtcttagaattctatgaggagatcttctctttagcgcacagtttgacatgtcaacaagtgtctccacagatgtggcagctactaccccttgtatttgaagtctttcagcaagatggctttgattactttacagatatgatgcccctccttcataattatgtaacagttgatacagacacacttctgtctgacaccaagtatcttgaaatgatatacagtatgtgcaaaaaggttcttacaggagttgcaggagaagatgcagagtgtcatgcagcaaaattgttagaggtcatcattctgcagtgcaaagggcgtggcattgaccagtgcattcccttattcgtggaagcagccttagaaagactgacaagagaggttaagacaagtgaacttcgaactatgtgtctgcaagttgcaattgcagctttgtattataatccacacctactactcaataccttagaaaatcttcgcttccctaataatgttgaaccagttacaaatcattttattacacagtggcttaatgatgttgactgtttcttggggcttcatgacagaaagatgtgtgttctcggactctgtgctcttattgatatggaacagataccccaagttttaaatcaggtttctggacagattttgccggcttttatccttttatttaacggattgaaaagagcatatgcctgccatgcagaacatgagaatgacagtgatgatgatgatgaagctgaagatgatgatgaaaccgaggaactggggagtgatgaagatgatattgatgaagatgggcaagaatatttggagattctggctaagcaggctggtgaagatggagatgatgaagattgggaagaagatgatgctgaagagactgctctggaaggctattccacaatcattgatgatgaagataaccctgttgatgagtatcagatatttaaagctatctttcaaactattcaaaatcgtaatcctgtgtggtatcaggcactgactcacggtcttaatgaagaacaaagaaaacagttacaggacatagcaactctggctgatcaaagaagagcagcccatgaatccaaaatgattgagaagcatggaggatacaaattcagtgctccagttgtgccaagttctttcaattttggaggcccagcaccagggatgaattgagttatctctttctttcctgctgtgtgcttgtagtgaagagcttgtgttcctcctagtagtggttccagaactggttcatgttatctattctaaactaataatcaatagatggacaaaagaaacaacaaccccaggagatgggacctgatcatgcaacctggcactggaaaagaaatcagcgggattttgggggtggggggggatgggaggtaccttagagggagtattttctttattttttgaagaaagtaagatcctgactctgaagcttcaaagtgacactgtggaaatctgaaacgaggggatgtcatgaaggcagcttttctttttctgaggaaaaaataggcatgggctacaggactatttaaaatgtctcatttacagtataaaactcaaaggtagatgtaatttttacacctatgagtatttgtccaatttctgtctcttcctcaccattgggtatctattctttatatgtaaataagataaggtcatctgatagccttattcagtcttcatcattttcatcattgttcctatgtagattattggacatttattgtagcactacataactgattataaaaatctgtaaatgaattagcactttcatattgaaacaagcctgctagcctatgtataaaatagcaaaatgtttgctgtttataaaaagatgtaatggggtggggggcaggggtaatttcaagttattaatttaaaaatgaactagcaattttgtacctggtgactttgtggtgcactcacctctgatagtgacttgaattcggtatgtaaaaaggggttagtggtatttcattgctgctaaaaatgacaactccctctgtgtcctgtttttcttaaagctgtcagtgtacaagtgggtatttgaataccagaccttactgtaaaaaataaaaaaggtggtatctagagcatgtaaattggatataaagttctgctcttaaagagttgatctaagagtatggctaaacatctatatatgcaatctattaaaagaacttaattcggctattatgtcttgatttgattgcagttttttcctaattataacaaatttttcctcattggcctgtttttaatcctgtgcctagaaggagtacaaaatgcacactttacaaaattgatatttaacacttacccactcccctttccccatctcttctaccgctcttgttgatcgtggtatctgatcttgactagataggctgaaggcacatggttccctccaaaaaccactattgataccactacaaaaacaagccagcaaaaagatactgtagagaggttggcttgcttccctctcttcctaactgcatgttgaaaaataagccgttattgatcttaaacatcggtcagatgagtcatacattgggttattttttatatacatgtatacacaaaatatttcaaattgaaagcaacatcttaatggattcaaaactattacaagctgttgtctaaaacaggtgagaaaaaaatttataactgtaaaaacaaatgcacatattgatatttaaaatgcgtaattaagaaaacccattgttgttgtgtttttcttgtataccaataattaagccactactgttggcactgtttggttttctattttaacactgaaggagtgaaagtatttcctatatttatgaatttactactaaaatcttggcaaaaaaagaaaaaaattgtctaacgtgtgtgggtgaaaactgttaatcaagtgtttctactcccccccgaaaatcccctgaaagttggacaccaactgtataccctaggttgcttaaagggatttcactattatataaagtcaataaaaatgaagtagttgtatatatgcaacattgtgtacagaggggaaataatgaatagtattaaagaaacattctcgtcttcctttacctttaatcccctaatacctagtctactttttaaattttcagacttcactgctttttgaattcataattctaattttcacattattgttaatggaaaatcatatctaataaaggttttagttattcccatgcacagtatgaaaattctcatttgctgaggttttgtttcaagaaaatgtattggcatgtctttgagaacatgttttattgtctcctgtgtcatataatccaaactaatctccgtttacagactttaacttgaaattagaccttataattaaactatttaaatagtgttcaaatgatagtttctaatgcatcaaatatatacctcagttttcatgatttcctttaacattataatttggtatagatcaagaatcttaacatgtatcagtttctagatgaggctgcaggatttttggaaaactttttgaatgtatttacaatattctcttgtaattagctacatagggacttgtctttttttctttttacatacagcttttcctacagttttattaccctgtaatttttttttagttgtagaagttaattctgattttgtgtggatttcagtatttgtctttgttaatggcacatattagcataaatcacttttgtaaatgtaagctttctttttttttcttgaaaaagcctttctatttatcagtattaaataaaggaagttaatctgtttctctgcaggtaataaaatagtgacacactgtattaagatagtgactgctatactcaactctggaagagactagagtatagagcatgagtggcaaaaccacagcccttgggccatatgctgctattcagtcccagatgtagcccctgaagcaagcataaagaaaaatgaattaaaaattaaattaatatggaaagttaaaaaatggattacattagtatgactaaaccatgtctttggcaaagatctaacacaatgtcttaagtataataggtagtctctgtttgtaaaataaatgacttaaatttaaaacatcaaaaaaaaaaaaaaaaaa

SEQ ID NO: 110 - DNA, 4004 bp, Homo sapiens
  pyruvate carboxylase transcript variant 1, mitochondrial precursor (PC, PCB), pyruvic carboxylase
  CDS (95)...(3631): PC
gtcagtggaggcagcagcggtagaggcggcggcgaggactggcgacggcgaggagatagtgtctgccttctggagagctgaccaaacactaaggatgctgaagttccgaacagtccatgggggcctgaggctcctgggaatccgccgaacctccaccgcccccgctgcctccccaaatgtccggcgcctggagtataagcccatcaagaaagtcatggtggccaacagaggtgagattgccatccgtgtgttccgggcctgcacggagctgggcatccgcaccgtagccatctactctgagcaggacacgggccagatgcaccggcagaaagcagatgaagcctatctcatcggccgcggcctggcccccgtgcaggcctacctgcacatcccagacatcatcaaggtggccaaggagaacaacgtagatgcagtgcaccctggctacgggttcctctctgagcgagcggacttcgcccaggcctgccaggatgcaggggtccggtttattgggccaagcccagaagtggtccgcaagatgggagacaaggtggaggcccgggccatcgccattgctgcgggtgttcccgttgtccctggcacagatgcccccatcacgtccctgcatgaggcccacgagttctccaacacctacggcttccccatcatcttcaaggcggcctatgggggtggagggcgtggcatgagggtggtgcacagctacgaggagctggaggagaattacacccgggcctactcagaggctctggccgcctttgggaatggggcgctgtttgtggagaagttcatcgagaagccacggcacatcgaggtgcagatcttgggggaccagtatgggaacatcctgcacctgtacgagcgagactgctccatccagcggcggcaccagaaggtggtcgagattgcccccgccgcccacctggacccgcagcttcggactcggctcaccagcgactctgtgaaactcgctaaacaggtgggctacgagaacgcaggcaccgtggagttcctggtggacaggcacggcaagcactacttcatcgaggtcaactcccgcctgcaggtggagcacacggtcacagaggagatcaccgacgtagacctggtccatgctcagatccacgtggctgagggcaggagcctacccgacctgggcctgcggcaggagaacatccgcatcaacgggtgtgccatccagtgccgggtcaccaccgaggaccccgcgcgcagcttccagccggacaccggccgcattgaggtgttccggagcggagagggcatgggcatccgcctggataatgcttccgccttccaaggagccgtcatctcgccccactacgactccctgctggtcaaagtcattgcccacggcaaagaccaccccacggccgccaccaagatgagcagggcccttgcggagttccgcgtccgaggtgtgaagaccaacatcgccttcctgcagaatgtgctcaacaaccagcagttcctggcaggcactgtggacacccagttcatcgacgagaacccagagctgttccagctgcggcctgcacagaaccgggcccaaaagctgttgcactacctcggccatgtcatggtaaacggtccaaccaccccgattcccgtcaaggccagccccagccccacggaccccgttgtccctgcagtgcccataggcccgcccccggctggtttcagagacatcctgctgcgagaggggcctgagggctttgctcgagctgtgcggaaccacccggggctgctgctgatggacacgaccttcagggacgcccaccagtcactgctggccactcgtgtgcgcacccacgatctcaaaaagatcgccccctatgttgcccacaacttcagcaagctcttcagcatggagaactggggaggagccacgtttgacgtcgccatgcgcttcctgtatgagtgcccctggcggcggctgcaggagctccgggagctcatccccaacatccctttccagatgctgctgcggggggccaatgctgtgggctacaccaactacccagacaacgtggtcttcaagttctgtgaagtggccaaagagaatggcatggatgtcttccgtgtgtttgactccctcaactacttgcccaacatgctgctgggcatggaggcggcaggaagtgccggaggcgtggtggaggctgccatctcatacacgggcgacgtggccgaccccagccgcaccaagtactcactgcagtactacatgggcttggccgaagagctggtgcgagctggcacccacatcctgtgcatcaaggacatggccgggctgctgaagcccacggcctgcaccatgctggtcagctccctccgggaccgcttccccgacctcccactgcacatccacacccacgacacgtcaggggcaggcgtggcagccatgctggcctgtgcccaggctggagctgatgtggtggatgtggcagctgattccatgtctgggatgacttcacagcccagcatgggggccctggtggcctgtaccagagggactcccctggacacagaggtgcccatggagcgcgtgtttgactacagtgagtactgggagggggctcggggactgtacgcggccttcgactgcacggccaccatgaagtctggcaactcggacgtgtatgaaaatgagatcccagggggccagtacaccaacctgcacttccaggcccacagcatggggcttggctccaagttcaaggaggtcaagaaggcctatgtggaggccaaccagatgctgggcgatctcatcaaggtgacgccctcctccaagatcgtgggggacctggcccagtttatggtgcagaatggattgagccgggcagaggccgaagctcaggcggaagagctgtcctttccccgctccgtggtggagttcctgcagggctacatcggtgtcccccatggggggttccccgaaccctttcgctctaaggtactgaaggacctgccaagggtggaggggcggcctggagcctccctccctcccctggatctgcaggcactggagaaggagctggtagaccggcatggggaggaggtgacgccggaagatgtgctctcagcagctatgtaccccgatgtgtttgcccacttcaaggacttcactgccacctttggccccctggatagcctgaatactcgcctcttcctgcagggacccaagatcgcagaggagtttgaggtggagctggagcggggcaagacgctgcacatcaaagccctggccgtgagcgacctgaaccgggccggccagaggcaggtcttctttgagctcaatgggcagctgcggtccatcttggtcaaggacacccaggccatgaaggagatgcacttccaccccaaggccctaaaggacgtgaagggccagatcggggcgcccatgcctgggaaggtgatagacatcaaagtggtggcaggggccaaggtggccaagggccagcccctgtgtgtgctcagtgccatgaagatggagactgtggtgacctcacccatggagggtactgtccgcaaggttcatgtgaccaaggacatgacactggaaggtgacgacctcatcctggagatcgagtgatcttgccccagaccggcagcctggccatccccaagccttcaacagaagctgtgctgccacggcaggcccaggccagccagtgcccgaggccaggaaggccgggccgtggaggtcctgtccacagctggacaggagagacaccgcctgcggtggttcattcctttcagccatcgtcctttcctccggcggacagctgcttacatgttcatctcttgccaaataagggtcccctcctcactggagactacaagtggtgggtcaggtggtcctaggacccaggggaggtttaggggtcctatctcctgggggaaggggagatctaagatgtcccaggtcctgggaagtttactcaataaagctggctttcccctgc

SEQ ID NO: 111 - DNA, 894 bp, Homo sapiens
  ubiquitin-40S ribosomal protein S27a precursor, S27A, ubiquitin carboxyl extension protein 80 (CEP80, UBCEP80), ubiquitin C (UBC), epididymis luminal protein 112 (HEL112), UBCEP1
  CDS (148)...(618): RPS27A
ggcgttcttccttttcgatccgccatctgcggtgggtgtctgcacttcggctgctctcgggttagcaccctatggtgccttctcttgtgatccctgacctaacctgtctcttccttttcctcaacctcaggtggagccgccaccaaaatgcagattttcgtgaaaacccttacggggaagaccatcaccctcgaggttgaaccctcggatacgatagaaaatgtaaaggccaagatccaggataaggaaggaattcctcctgatcagcagagactgatctttgctggcaagcagctggaagatggacgtactttgtctgactacaatattcaaaaggagtctactcttcatcttgtgttgagacttcgtggtggtgctaagaaaaggaagaagaagtcttacaccactcccaagaagaataagcacaagagaaagaaggttaagctggctgtcctgaaatattataaggtggatgagaatggcaaaattagtcgccttcgtcgagagtgcccttctgatgaatgtggtgctggggtgtttatggcaagtcactttgacagacattattgtggcaaatgttgtctgacttactgtttcaacaaaccagaagacaagtaactgtatgagttaataaaagacatgaactaacatttattgttgggttttattgcagtaaaaagaatggtttttaagcaccaaattgatggtcacaccatttccttttagtagtgctactgctatcgctgtgtgaatgttgcctctggggattatgtgacccagtggttctgtatacctgccaggtgccaaccacttgtaaaggtcttgatattttcaattcttagactacctatactttggcagaagttatatttaatgtaagttgtctaaatataa

SEQ ID NO: 112 - DNA, 2282 bp, Homo sapiens
  secreted and transmembrane protein 1 precursor (SECTM1), type 1a transmembrane protein, K12
  CDS (399)...(1145): SECTM1
aaacagccccgcggggaacgcgcgccgcacgcgagctggacccgcccaggcacgaactctcctggaaaaatgctcccggcggctttcctgcttcctttagcgtgaaccgcgggtgcggtgcctcccgtgaaaataataaattcaccgtcacgcttgttgtgaacgcgggtggttcccgaaacttggaggcttcccgtaaacccagctccttcctcatctgggaggtgggtcccgcgcgggtccgccgcctcctccctggcccctccctctcgtgtctttcattttcctggggctccggggcgcggagaagctgcatcccagaggagcgcgtccaggagcggacccgggagtgtttcaagagccagtgacaaggaccaggggcccaagtcccaccagccatgcagacctgccccctggcattccctggccacgtttcccaggcccttgggaccctcctgtttttggctgcctccttgagtgctcagaatgaaggctgggacagccccatctgcacagagggggtagtctctgtgtcttggggcgagaacaccgtcatgtcctgcaacatctccaacgccttctcccatgtcaacatcaagctgcgtgcccacgggcaggagagcgccatcttcaatgaggtggctccaggctacttctcccgggacggctggcagctccaggttcagggaggcgtggcacagctggtgatcaaaggcgcccgggactcccatgctgggctgtacatgtggcacctcgtgggacaccagagaaataacagacaagtcacgctggaggtttcaggtgcagaaccccagtccgcccccgacactgggttctggcctgtgccagcggtggtcactgctgtcttcatcctcttggtcgctctggtcatgttcgcctggtacaggtgccgctgttcccagcaacgccgggagaagaagttcttcctcctagaaccccagatgaaggtcgcagccctcagagcgggagcccagcagggcctgagcagagcctccgctgaactgtggaccccagactccgagcccaccccaaggccgctggcactggtgttcaaaccctcaccacttggagccctggagctgctgtccccccaacccttgtttccatatgccgcagacccatagccgcctgcaaggcagagaggacacaggagagccagccctgagtgccgaccttgggtggcggggcctgggtctctcgtcccacccggagggcacagacaccggcttgcttggcaggctgggcctctgtgtcacccactcctgggtgcgtgcagacccttcccctccaccccccaggtcttccaagctctgcttcctcagtttccaaaatggaaccacctcacctccgcagcacccgacttaccaggacgcatgcccctccctctgccctcatcaaacccacagacccggactccctttctgccaccccaggctggtccggccccaggtgtggggtccgctctctccactcccagggctccgcgcccaagtgagggggcccctgccggagcctcagacacactccagttcagggctgtggggggccttggccacatacctgtcccttggctatgagcaggctttgggggcccttccgcggcagccccgggggccgaggtagggtcgggggcttagaggctgggatggctcctggccccaccgccagggggcagcgcaggccgggctgggaggcggcggcggcggctcgggctggggggtcaggtggacgccgccctccggggctggacgcgcatccctcagtccctcggccacccgggggtcgctccctcgtgcccaccgcacctgccgagcctctttggacccagatctgttcatgcttttgtcttcgtcactgcggcggggccctttgatgtcttcatctgtatggggtggaaaaatcaccgggaatcccccttcagttctttgaaaaagttccatgactcgaatatctgaaatgaagaaaacaaaccgactcacaaacctccaagtagctccaaatgcaatttttaaaatggaaaacaaaaatctgaaagaaacgtctttagtggctttaagccccaaaacgtccctaaggcgtcctcgagatgaagacgggggggagcccccagccaggtggagaccccgcagggacgcggcggcgcccggtgaccgaggcctcgcacagccggccgccctgagggtcgggccggagccagggtccaagaggggcgcgtttgtgtctcgggttaaaataaggttccgtccgcgtgctgggtcaga

SEQ ID NO: 113 - DNA, 593 bp, Homo sapiens
  60S ribosomal protein L41 transcript variant 2, L41, homologue of yeast ribosomal protein YL41, HG12 protein
  CDS (199)...(276): RPL41
acccggcgctccattaaatagccgtagacggaacttcgcctttctctcggccttagcgccatttttttgggtgagtgttttttggttcctgcgttgggattccgtgtacaatccatagacatctgacctcggcacttagcatcatcacagcaaactaactgtagcctttctctctttccctgtagaaacctctgcgccatgagagccaagtggaggaagaagcgaatgcgcaggctgaagcgcaaaagaagaaagatgaggcagaggtccaagtaaaccgctagcttgttgcaccgtggaggccacaggagcagaaacatggaatgccagacgctggggatgctggtacaagttgtgggactgcatgctactgtctagagcttgtctcaatggatctagaacttcatcgccctctgatcgccgatcacctctgagacccaccttgctcataaacaaaatgcccatgttggtcctctgccctggacctgtgacattctggactatttctgtgtttatttgtggccgagtgtaacaaccatataataaatcacctcttccgctgttttagctgaagaattaaatcaaaaaaaaaa

SEQ ID NO: 114 - DNA, 5675 bp, Homo sapiens
  tuberous sclerosis 2 transcript variant 1 (TSC2), tuberin, LAM, TSC4
  CDS (107)...(5530): TSC2
ccggcggcgtcccggggccaggggggtgcgcctttctccgcgtcggggcggcccggagcgcggtggcgcggcgcgggaggggttttctggtgcgtcctggtccaccatggccaaaccaacaagcaaagattcaggcttgaaggagaagtttaagattctgttgggactgggaacaccgaggccaaatcccaggtctgcagagggtaaacagacggagtttatcatcaccgcggaaatactgagagaactgagcatggaatgtggcctcaacaatcgcatccggatgatagggcagatttgtgaagtcgcaaaaaccaagaaatttgaagagcacgcagtggaagcactctggaaggcggtcgcggatctgttgcagccggagcggccgctggaggcccggcacgcggtgctggctctgctgaaggccatcgtgcaggggcagggcgagcgtttgggggtcctcagagccctcttctttaaggtcatcaaggattacccttccaacgaagaccttcacgaaaggctggaggttttcaaggccctcacagacaatgggagacacatcacctacttggaggaagagctggctgactttgtcctgcagtggatggatgttggcttgtcctcggaattccttctggtgctggtgaacttggtcaaattcaatagctgttacctcgacgagtacatcgcaaggatggttcagatgatctgtctgctgtgcgtccggaccgcgtcctctgtggacatagaggtctccctgcaggtgctggacgccgtggtctgctacaactgcctgccggctgagagcctcccgctgttcatcgttaccctctgtcgcaccatcaacgtcaaggagctctgcgagccttgctggaagctgatgcggaacctccttggcacccacctgggccacagcgccatctacaacatgtgccacctcatggaggacagagcctacatggaggacgcgcccctgctgagaggagccgtgttttttgtgggcatggctctctggggagcccaccggctctattctctcaggaactcgccgacatctgtgttgccatcattttaccaggccatggcatgtccgaacgaggtggtgtcctatgagatcgtcctgtccatcaccaggctcatcaagaagtataggaaggagctccaggtggtggcgtgggacattctgctgaacatcatcgaacggctccttcagcagctccagaccttggacagcccggagctcaggaccatcgtccatgacctgttgaccacggtggaggagctgtgtgaccagaacgagttccacgggtctcaggagagatactttgaactggtggagagatgtgcggaccagaggcctgagtcctccctcctgaacctgatctcctatagagcgcagtccatccacccggccaaggacggctggattcagaacctgcaggcgctgatggagagattcttcaggagcgagtcccgaggcgccgtgcgcatcaaggtgctggacgtgctgtcctttgtgctgctcatcaacaggcagttctatgaggaggagctgattaactcagtggtcatctcgcagctctcccacatccccgaggataaagaccaccaggtccgaaagctggccacccagttgctggtggacctggcagagggctgccacacacaccacttcaacagcctgctggacatcatcgagaaggtgatggcccgctccctctccccacccccggagctggaagaaagggatgtggccgcatactcggcctccttggaggatgtgaagacagccgtcctggggcttctggtcatccttcagaccaagctgtacaccctgcctgcaagccacgccacgcgtgtgtatgagatgctggtcagccacattcagctccactacaagcacagctacaccctgccaatcgcgagcagcatccggctgcaggcctttgacttcctgttgctgctgcgggccgactcactgcaccgcctgggcctgcccaacaaggatggagtcgtgcggttcagcccctactgcgtctgcgactacatggagccagagagaggctctgagaagaagaccagcggccccctttctcctcccacagggcctcctggcccggcgcctgcaggccccgccgtgcggctggggtccgtgccctactccctgctcttccgcgtcctgctgcagtgcttgaagcaggagtctgactggaaggtgctgaagctggttctgggcaggctgcctgagtccctgcgctataaagtgctcatctttacttccccttgcagtgtggaccagctgtgctctgctctctgctccatgctttcaggcccaaagacactggagcggctccgaggcgccccagaaggcttctccagaactgacttgcacctggccgtggttccagtgctgacagcattaatctcttaccataactacctggacaaaaccaaacagcgcgagatggtctactgcctggagcagggcctcatccaccgctgtgccagccagtgcgtcgtggccttgtccatctgcagcgtggagatgcctgacatcatcatcaaggcgctgcctgttctggtggtgaagctcacgcacatctcagccacagccagcatggccgtcccactgctggagttcctgtccactctggccaggctgccgcacctctacaggaactttgccgcggagcagtatgccagtgtgttcgccatctccctgccgtacaccaacccctccaagtttaatcagtacatcgtgtgtctggcccatcacgtcatagccatgtggttcatcaggtgccgcctgcccttccggaaggattttgtccctttcatcactaagggcctgcggtccaatgtcctcttgtcttttgatgacacccccgagaaggacagcttcagggcccggagtactagtctcaacgagagacccaagagtctgaggatagccagaccccccaaacaaggcttgaataactctccacccgtgaaagaattcaaggagagctctgcagccgaggccttccggtgccgcagcatcagtgtgtctgaacatgtggtccgcagcaggatacagacgtccctcaccagtgccagcttggggtctgcagatgagaactccgtggcccaggctgacgatagcctgaaaaacctccacctggagctcacggaaacctgtctggacatgatggctcgatacgtcttctccaacttcacggctgtcccgaagaggtctcctgtgggcgagttcctcctagcgggtggcaggaccaaaacctggctggttgggaacaagcttgtcactgtgacgacaagcgtgggaaccgggacccggtcgttactaggcctggactcgggggagctgcagtccggcccggagtcgagctccagccccggggtgcatgtgagacagaccaaggaggcgccggccaagctggagtcccaggctgggcagcaggtgtcccgtggggcccgggatcgggtccgttccatgtcggggggccatggtcttcgagttggcgccctggacgtgccggcctcccagttcctgggcagtgccacttctccaggaccacggactgcaccagccgcgaaacctgagaaggcctcagctggcacccgggttcctgtgcaggagaagacgaacctggcggcctatgtgcccctgctgacccagggctgggcggagatcctggtccggaggcccacagggaacaccagctggctgatgagcctggagaacccgctcagccctttctcctcggacatcaacaacatgcccctgcaggagctgtctaacgccctcatggcggctgagcgcttcaaggagcaccgggacacagccctgtacaagtcactgtcggtgccggcagccagcacggccaaaccccctcctctgcctcgctccaacacagtggcctctttctcctccctgtaccagtccagctgccaaggacagctgcacaggagcgtttcctgggcagactccgccgtggtcatggaggagggaagtccgggcgaggttcctgtgctggtggagcccccagggttggaggacgttgaggcagcgctaggcatggacaggcgcacggatgcctacagcaggtcgtcctcagtctccagccaggaggagaagtcgctccacgcggaggagctggttggcaggggcatccccatcgagcgagtcgtctcctcggagggtggccggccctctgtggacctctccttccagccctcgcagcccctgagcaagtccagctcctctcccgagctgcagactctgcaggacatcctcggggaccctggggacaaggccgacgtgggccggctgagccctgaggttaaggcccggtcacagtcagggaccctggacggggaaagtgctgcctggtcggcctcgggcgaagacagtcggggccagcccgagggtcccttgccttccagctccccccgctcgcccagtggcctccggccccgaggttacaccatctccgactcggccccatcacgcaggggcaagagagtagagagggacgccttaaagagcagagccacagcctccaatgcagagaaagtgccaggcatcaaccccagtttcgtgttcctgcagctctaccattcccccttctttggcgacgagtcaaacaagccaatcctgctgcccaatgagtcacagtcctttgagcggtcggtgcagctcctcgaccagatcccatcatacgacacccacaagatcgccgtcctgtatgttggagaaggccagagcaacagcgagctcgccatcctgtccaatgagcatggctcctacaggtacacggagttcctgacgggcctgggccggctcatcgagctgaaggactgccagccggacaaggtgtacctgggaggcctggacgtgtgtggtgaggacggccagttcacctactgctggcacgatgacatcatgcaagccgtcttccacatcgccaccctgatgcccaccaaggacgtggacaagcaccgctgcgacaagaagcgccacctgggcaacgactttgtgtccattgtctacaatgactccggtgaggacttcaagcttggcaccatcaagggccagttcaactttgtccacgtgatcgtcaccccgctggactacgagtgcaacctggtgtccctgcagtgcaggaaagacatggagggccttgtggacaccagcgtggccaagatcgtgtctgaccgcaacctgcccttcgtggcccgccagatggccctgcacgcaaatatggcctcacaggtgcatcatagccgctccaaccccaccgatatctacccctccaagtggattgcccggctccgccacatcaagcggctccgccagcggatctgcgaggaagccgcctactccaaccccagcctacctctggtgcaccctccgtcccatagcaaagcccctgcacagactccagccgagcccacacctggctatgaggtgggccagcggaagcgcctcatctcctcggtggaggacttcaccgagtttgtgtgaggccggggccctccctcctgcactggccttggacggtattgcctgtcagtgaaataaataaagtcctgaccccagtgcacagacatagaggcacagattgcaaaaaaaaaaaaaaaaaaaaaaaaaaaaaaaaaaaaaaaaaaaa

SEQ ID NO: 115 - DNA, 5436 bp, Homo sapiens
  collagen, type XVIII, alpha 1 transcript variant 3 (COL18A1), collagen alpha-1(XVIII) chain, endostatin, antiangiogenic agent, multi-functional protein MFP, KNO, KNO1, KS
  CDS (95)...(4114): COL18A1
ctcccagcggcggcggctgcagcgcggcggtccgagcgggtgcaccgcggcggaggaggcagcatcccgcggcgctgacggtcctggggagagcatggcgccgaggtgcccctggccatggccgcggcggcggcgcctcctggacgtgctcgcgcccctggtcctgctgctcggggtccgcgcggcctccgcggagccagagcgcatcagcgaggaggtggggctgctgcagctccttggggaccccccgccccagcaggtcacccagacggatgaccccgacgtcgggctggcctacgtctttgggccagatgccaacagtggccaagtggcccggtaccacttccccagcctcttcttccgtgacttctcactgctgttccacatccggccagccacagagggcccaggggtgctgttcgccatcacggactcggcgcaggccatggtcttgctgggcgtgaagctctctggggtgcaggacgggcaccaggacatctccctgctctacacagaaccaggtgcaggccagacccacacagccgccagcttccggctccccgccttcgtcggccagtggacacacttagccctcagtgtggcaggtggctttgtggccctctacgtggactgtgaggagttccagagaatgccgcttgctcggtcctcacggggcctggagctggagcctggcgccgggctcttcgtggctcaggcggggggagcggaccctgacaagttccagggggtgatcgctgagctgaaggtgcgcagggacccccaggtgagccccatgcactgcctggacgaggaaggcgatgactcagatggggcatccggagactctggcagcgggctcggggacgcccgggagcttctcagggaggagacgggcgcggccctaaaacccaggctccccgcgccaccccccgtcaccacgccacccttggctggaggcagcagcacggaagattccagaagtgaagaagtcgaggagcagaccacggtggcttcgttaggagctcagacacttcctggctcagattctgtctccacgtgggacgggagtgtccggacccctgggggccgcgtgaaagagggcggcctgaaggggcagaaaggggagccaggtgttccgggcccacctggccgggcaggccccccaggatccccatgcctacctggtcccccgggtctcccgtgcccagtgagtcccctgggtcctgcaggcccagcgttgcaaactgtccccggaccacaaggacccccagggcctccggggagggacggcacccctggaagggacggcgagccgggcgaccccggtgaagacggaaagccgggcgacaccgggccacaaggcttccccgggactccaggggacgtaggtcccaagggcgacaagggagaccctggggttggagagagagggcccccaggaccccaagggcctccagggcccccaggaccctccttcagacacgacaagctgaccttcattgacatggagggatctggcttcgggggcgatctggaggccctgcggggtcctcgaggcttccctggacctcccggaccccccggtgtcccaggcctgcccggcgagccaggccgctttggggtgaacagctccgacgtcccaggacccgccggccttcctggtgtgcctgggcgcgagggtccccccgggtttcctggcctcccgggacccccaggccctccgggaagagaggggcccccaggaaggactgggcagaaaggcagcctgggtgaagcaggcgccccaggacataaggggagcaagggagcccccggtcctgctggtgctcgtggggagagcggcctggcaggagcccccggacctgctggaccaccaggcccccctgggccccctgggcccccaggaccaggactccccgctggatttgatgacatggaaggctccggggggcccttctggtcaacagcccgaagcgctgatgggccacagggacctcccggcctgccgggacttaagggggatcctggcgtgcctgggctgccgggggcgaagggagaagttggagcagatggagtccccgggttccccggcctccctggcagagagggcattgctgggccccaggggccaaagggagacagaggcagccggggagaaaagggagatccagggaaggacggagtcgggcagccgggcctccctggcccccccggacccccgggacctgtggtctacgtgtcggagcaggacggatccgtcctgagcgtgccgggacctgagggccggccgggtttcgcaggctttcccggacctgcaggacccaagggcaacctgggctctaagggcgaacgaggctccccgggacccaagggtgagaagggtgaaccgggcagcatcttcagccccgacggcggtgccctgggccctgcccagaaaggagccaagggagagccgggcttccgaggacccccgggtccatacggacggccggggtacaagggagagattggctttcctggacggccgggtcgccccgggatgaacggattgaaaggagagaaaggggagccgggagatgccagccttggatttggcatgaggggaatgcccggccccccaggacctccagggcccccaggccctccagggactcctgtttacgacagcaatgtgtttgctgagtccagccgccccgggcctccaggattgccagggaatcagggccctccaggacccaagggcgccaaaggagaagtgggcccccccggaccaccagggcagtttccgtttgactttcttcagttggaggctgaaatgaagggggagaagggagaccgaggtgatgcaggacagaaaggcgaaaggggggagcccgggggcggcggtttcttcggctccagcctgcccggcccccccggccccccaggccccccaggcccacgtggctaccctgggattccaggtcccaagggagagagcatccggggccagcccggcccacctggacctcagggaccccccggcatcggctacgaggggcgccagggccctcccggccccccaggccccccagggcccccttcatttcctggccctcacaggcagactatcagcgttcccggccctccgggcccccctgggccccctgggccccctggaaccatgggcgcctcctcaggggtgaggctctgggctacacgccaggccatgctgggccaggtgcacgaggttcccgagggctggctcatcttcgtggccgagcaggaggagctctacgtccgcgtgcagaacgggttccggaaggtccagctggaggcccggacaccactcccacgagggacggacaatgaagtggccgccttgcagccccccgtggtgcagctgcacgacagcaacccctacccgcggcgggagcacccccaccccaccgcgcggccctggcgggcagatgacatcctggccagcccccctcgcctgcccgagccccagccctaccccggagccccgcaccacagctcctacgtgcacctgcggccggcgcgacccacaagcccacccgcccacagccaccgcgacttccagccggtgctccacctggttgcgctcaacagccccctgtcaggcggcatgcggggcatccgcggggccgacttccagtgcttccagcaggcgcgggccgtggggctggcgggcaccttccgcgccttcctgtcctcgcgcctgcaggacctgtacagcatcgtgcgccgtgccgaccgcgcagccgtgcccatcgtcaacctcaaggacgagctgctgtttcccagctgggaggctctgttctcaggctctgagggtccgctgaagcccggggcacgcatcttctcctttgacggcaaggacgtcctgaggcaccccacctggccccagaagagcgtgtggcatggctcggaccccaacgggcgcaggctgaccgagagctactgtgagacgtggcggacggaggctccctcggccacgggccaggcctcctcgctgctggggggcaggctcctggggcagagtgccgcgagctgccatcacgcctacatcgtgctctgcattgagaacagcttcatgactgcctccaagtagccaccgcctggatgcggatggccggagaggaccggcggctcggaggaagcccccaccgtgggcagggagcggccggccagcccctggccccaggacctggctgccatactttcctgtatagttcacgtttcatgtaatcctcaagaaataaaaggaagccaaagagtgtatttttttaaaagtttaaaacagaagcctgatgctgacattcacctgccccaactctcccctgacctgtgagcccagctgggtcaggcagggtgcagtatcatgccctgtgcaacctcttggcctgatcagaccacggctcgatttctccaggatttcctgctttgggaagccgtgctcgccccagcaggtgctgacttcatctcccacctagcagcaccgttctgtgcacaaaacccagacctgttagcagacaggccccgtgaggcaatgggagctgaggccacactcagcacaaggccatctgggctcctccagggtgtgtgctcgccctgcggtagatgggagggaggctcaggtccctggggctagggggagccccttctgctcagctctgggccattctccacagcaaccccaggctgaagcaggttcccaagctcagaggcgcactgtgacccccagctccggcctgtcctccaacaccaagcacagcagcctggggctggcctcccaaatgagccatgagatgatacatccaaagcagacagctccaccctggccgagtccaagctgggagattcaagggacccatgagttggggtctggcagcctcccatccagggcccccatctcatgcccctggctgggacgtggctcagccagcacttgtccagctgagcgccaggatggaacacggccacatcaaagaggctgaggctggcacaggacatgcggtagccagcacacagggcagtgagggagggctgtcatctgtgcactgcccatggacaggctggctccagatgcagggcagtcattggctgtctcctaggaaacccatatccttaccctccttgggactgaaggggaaccccggggtgcccacaggccgccctgcgggtgaacaaagcagccacgaggtgcaacaaggtcctctgtcagtcacagccacccctgagatccggcaacatcaacccgagtcattcgttctgtggagggacaagtggactcagggcagcgccaggctgaccacagcacagccaacacgcacctgcctcaggactgcgacgaaaccggtggggctggttctgtaattgtgtgtgatgtgaagccaattcagacaggcaaataaaagtgaccttttacactga

SEQ ID NO: 116 - DNA, 3230 bp, Homo sapiens
  calcium binding protein P22 (CHP, CHP1, p22), calcineurin-like EF-hand protein 1, EF-hand calcium-binding domain-containing protein p22, calcineurin B-like protein, SLC9A1 binding protein (SLC9A1BP), Sid470p
  CDS (145)...(732): CHP
accacccctgggttccctcccgggtccgcagtggaaacactgccctctcccttcttgacccctagcccttccttccctccctccttccctcctgtcgccgtctcttctggcgccgctgctcccggaggagctcccggcacggcgatgggttctcgggcctccacgttactgcgggacgaagagctcgaggagatcaagaaggagaccggcttttcccacagtcaaatcactcgcctctacagccggttcaccagcctggacaaaggagagaatgggactctcagccgggaagatttccagaggattccagaacttgccatcaacccactgggggaccggatcatcaatgccttctttccagagggagaggaccaggtaaacttccgtggattcatgcgaactttggctcatttccgccccattgaggataatgaaaagagcaaagatgtgaatggacccgaaccactcaacagccgaagcaacaaactgcactttgcttttcgactatatgatttggataaagatgaaaagatctcccgtgatgagctgttacaggtgctacgcatgatggtcggagtaaatatctcagatgagcagctgggcagcatcgcagacaggaccattcaggaggctgatcaggatggggacagtgccatatctttcacagaatttgttaaggttttggagaaggtggatgtagaacagaaaatgagcatccgatttcttcactaaaggagaccaaactgttccttgcggtctagtatttaagaactggaacttgaaagtcctccttctaccaactccacctccaccccctcattccccttctcccaaagtactactgctgttgcatgacaaccccaaatatgttctgtcaacacaaacctgcctttggtgtataaacagggcattacagaatggtacaccctatatatttctgttcagtatccattcactagttcttcatttataaatatcatcttccccattctgctgctgaatgccacacatccatccagtctgagaaagtgagagaggcaatcatgccaagaacaagccagcaaagctctttcaccagatgtagactgtagccctgctgccttccctccagcgagtctgccagcatgcttcttcatcctttttatatgttctttgcttcctacttccctgtcttccaacatactgttcacttactctggcagtctttctgcttttcattaagcctcaaaatctcctctgttctacttggcaccacaagctatgtcctatatatgtatttctgacttggcaggatagttcaggggtctggcagtttttatttaccttcattattaaatgggcctctgggatgttgcctcttcaggagctttttggtaatcaatacttctctcagaagtatgagaccatcctctgcactctgctctgtcatcaaaggctgctgggtggagataccctttttgaaaggtggccttggtgagaggtatggagccaagtcttctaggttgcttgcccacatcactctatctctggcctctgattctcaactttgtacctgtgtggctcctcttgttagtgcaatgttgactgttgaaaaagcagcagtatgcttacaggtttgcttagtttggggacaccgttaccaccagaatggctgctctgacaatatgcctagggactttctcatggcttttatttaataaggaggctgggcaccctataaagcctcatgcattcacacctttgcagcatggtttatgcctcagtgttatgtgcactggaatgttttccacttcacatttccaagtagaaatattagtgttacggaagtgcctaatatcccagtccaaatttttttttttttttttttttttttttgagacagagtcttgctctgtcacccaggctggagtgcagtggtgcgatcgctcactgcaacctcagcctcctggatttaagtgattctcctgcctcagcctcccaagtagctgggattacaggtgtgcaccaccatgcccggctaattttttgtatttttagtggagacagggtttcaccatgttggccaggctggtctcgaactcctgacctcgtgatccgcctgcctcagcctcccaaagtgctgggattacaggtgtgagccaccacgcctggccccagtccaaaatatttaaagattgtttccttagtgtcttgaagttttgcacaaaattcttttttttgagatggagtctcactctgtcacccaggctggagtgcagtggcgtgatcttggctcactgcaacctctgcctcctgggttcaagcaattctcccacctcagcctcccaagtagctgggattacagacgtgtgccaccatacctgggtaatttttgcatttttagtggagagggagtttcaccatgttggccaggttggtcttgaactcctgacctcaggtgatcctcctgcctcggcctcccaaagtgctgggattacaggcatgagccaccgtgctcagccgcaaaattctttatgaattttacacttggcaaatgttaatgacggaagccatagtctgctcctaatacatgtccaaagcattgactgttgtgtcattagctgcctggttacattagctccctggcttcttgtttagaccactgctaatcccttaaaaacaagaggtctggcactagtagcacaacctaaggtggcattacagatctttgagcgagccacagcaacttttctgccaagtcagcttagtttagacttcagtgaatcaggctattgctatcctaatgtatgtctctatgagtgtatttagccacacatctgcccttggttgactttctgactcattgcttgcttgcttgtttccttgctttggaaaactattgaagattgctaaaaaataccactgcaaagtgatggaaaagggtggagaacaggggagtagccaggctggatggctcaaatataaatgaatgaggaattctttatgaagtatcagtcagattttatgattaagtgatgtaatataggaattatgtaaaagggaagaatgtctgatactgatctattagagaggtactttagaggcttcttgattggcataaagttcctaaggttatagattttccccccttttggctgtatagcaaagtgttttaatccacggttgtgccttattgttccattaaaattgtatcttcgatccatcaataaatacttgtggttgaaacaaaa

SEQ ID NO: 117 - DNA, 4511 bp, Homo sapiens
  phosphofurin acidic cluster sorting protein 1 (PACS1), cytosolic sorting protein PACS-1, MRD17
  CDS (135)...(3026): PACS1
gcagctcgctggctgctcgcgctcgggcaggcgggctgaggaggctgccgcgcccccgccgccgccgccgcgggggaagcctgggagccagatcggcgtcgcctcggcctccgtaacccccgcctagccgggccatggcggaacgcggaggggcgggcggtggtcccggaggcgccgggggcggcagcggccagcggggatccggggtcgcccagtcccctcagcagccgccgccgcagcagcagcagcagcagccgccgcagcagccgacgccccccaagctggcccaggccacctcgtcgtcctcgtccacctcggcggcggctgcctcctcctcgtcctcgtctacctccacctccatggccgtggcggtggcctcgggctccgcgcctcccggtggcccggggccaggccgcacccccgccccggtgcagatgaacctgtacgccacctgggaggtggaccggagctcgtccagctgcgtgcctaggctattcagcttgaccctgaagaaactcgtcatgctaaaagaaatggacaaagatcttaactcagtggtcatcgctgtgaagctgcagggttcaaaaagaattcttcgctccaacgagatcgtccttccagctagtggactggtggaaacagagctccaattaaccttctcccttcagtaccctcatttccttaagcgagatgccaacaagctgcagatcatgctgcaaaggagaaaacgttacaagaatcggaccatcttgggctataagaccttggccgtgggactcatcaacatggcagaggtgatgcagcatcctaatgaaggcgcactggtgcttggcctacacagcaacgtgaaggatgtctctgtgcctgtggcagaaataaagatctactccctgtccagccaacccattgaccatgaaggaatcaaatccaagctttctgatcgttctcctgatattgacaattattctgaggaagaggaagagagtttctcatcagaacaggaaggcagtgatgatccattgcatgggcaggacttgttctacgaagacgaagatctccggaaagtgaagaagacccggaggaaactaacctcaacctctgccatcacaaggcaacctaacatcaaacagaagtttgtggccctcctgaagcggtttaaagtttcagatgaggtgggctttgggctggagcatgtgtcccgcgagcagatccgggaagtggaagaggacttggatgaattgtatgacagtctggagatgtacaaccccagcgacagtggccctgagatggaggagacagaaagcatcctcagcacgccaaagcccaagctcaagcctttctttgaggggatgtcgcagtccagctcccagacggagattggcagcctcaacagcaaaggcagcctcggaaaagacaccaccagccctatggaattggctgctctagaaaaaattaaatctacttggattaaaaaccaagatgacagcttgactgaaacagacactctggaaatcactgaccaggacatgtttggagatgccagcacgagtctggttgtgccggagaaagtcaaaactcccatgaagtccagtaaaacggatctccagggctctgcctcccccagcaaagtggagggggtgcacacaccccggcagaagaggagcacgcccctgaaggagcggcagctctccaagcccctaagtgagaggaccaacagttccgacagcgagcgctccccagatctgggccacagcacgcagattccaagaaaggtggtgtatgaccagctcaatcagatcctggtgtcagatgcagccctcccagaaaatgtcattctggtgaacaccactgactggcagggccagtatgtggctgagctgctccaggaccagcggaagcctgtggtgtgcacctgctccaccgtggaggtccaggccgtgctgtccgccctgctcacccggatccagcgctactgcaactgcaactcttccatgccgaggccagtgaaggtggctgctgtgggaggccagagctacctgagctccatcctcaggttctttgtcaagtccctggccaacaagacctccgactggcttggctacatgcgcttcctcatcatccccctcggttctcaccctgtggccaaatacttggggtcagtcgacagtaaatacagtagttccttcctggattctggttggagagatctgttcagtcgctcggagccaccagtgtcagagcaactggacgtggcagggcgggtgatgcagtacgtcaacggggcagccacgacacaccagcttcccgtggccgaagccatgctgacttgccggcataagttccctgatgaagactcctatcagaagtttattcccttcattggcgtggtgaaggtgggtctggttgaagactctccctccacagcaggcgatggggacgattctcctgtggtcagccttactgtgccctccacatcaccaccctccagctcgggcctgagccgagacgccacggccacccctccctcctccccatctatgagcagcgccctggccatcgtggggagccctaatagcccatatggggacgtgattggcctccaggtggactactggctgggccaccccggggagcggaggagggaaggcgacaagagggacgccagctcgaagaacaccctcaagagtgtcttccgctcagtgcaggtgtcccgcctgccccatagtggggaggcccagctttctggcaccatggccatgactgtggtcaccaaagaaaagaacaagaaagttcccaccatcttcctgagcaagaaaccccgagaaaaggaggtggattctaagagccaggtcattgaaggcatcagccgcctcatctgctcagccaagcagcagcagactatgctgagagtgtccatcgatggggtcgagtggagtgacatcaagttcttccagctggcagcccagtggcccacccatgtcaagcactttccagtgggactcttcagtggcagcaaggccacctgaggccctgtctcccagccactttccctcctggcactgccaccagcctcaccgcctgcgggcagggggaggccagcaggcccgggcccagcaccccttccctggcaccagggtctgcctctcactcgcccaggtcccgaaggacactgccacagggacgccttccctcccctcccctccagcccacccctgcacagcccctcctccttcccgcttttccccttctccctcctgctccaggcccaaggcgtgttggttttgccttctggtgcccatagtcccctggactgagtcccccaggccttccttcacccgacttccaaactcttccttgtggtatcagtttccttctcggaaatgagaaagctggaatcctggtccccagcaggagagcctagtcctcccccagcccctccagccaccagggtgtcctctaggatgcagctgccagatccactcactctgctgcctccagcaggacccaaggccactttcaactcttatggggttctccacctgccccagagcttctcaagggagggtaagggggcaccctgagcccacaggacccctacttcacagctcacaggggcaggaggcagctcccctgcctccaggaccctgttgctatggtgacacagcgtttctaggacagaggggcctcccagtctccccccaccacccgtgcacgacttcctcaccacccccaggttccctgcagatgtcgtgtgtgtcctgagtgtttctttggttctttgcacgccaagtctcttggttgtaccatgtgacacaccctgtgcactggtcgctgtcttcgtggcttccacccttgttaatgatgctcctgcctctgcctcccagcccctcacccagcacagctctgcctggacttggagagatgggaggcagacccccaccaccatacatgctgtctgtggcccctcagacattctgtttcatctcccattcatctccctcctcccaccgtgtcagtttttctgcctttccctgctctgttcttccccctccttaggccccagcctgggcccagacccatcctcccagccaggtttccctccagcaggctccttccctccctgtcacctccctctcaccaacccggggtctgagcccctcattcctgaccgtccgtgttctcaggagtggttgaggacacagggccccagcccagccctctgcaccccccagcccggccatctgcgccccacagcccctttggagcttttctcttgtcctctcactccttcccagaagtttttgcacagaacttcattttgaaagtgtttttctcattctccatacctcccccaagctctcctccagcccttcccagggctcagccctgctgtcctgagcgtctcctgggccagagagaggagatgggggtgggagggactgagttgatgttgggtttttcattcaataaattggtgatttcttaccgactgcaaaaaaaaaaaaaaaaaa

SEQ ID NO: 118 - DNA, 3585 bp, Homo sapiens
  general transcription factor IIIB (TF3B90, TFIIIB90), BRF1, RNA polymerase III transcription initiation factor 90 kDa subunit transcript variant 3, TATA box binding protein (TBP)-associated factor, RNA polymerase III, GTF3B subunit 2
  CDS (884)...(2305): BRF1
gtggcatggggcactggctttgctgatgaggagaccagacttcagaggccgtgtcacctggcctgggccgcacagctggtgcatgccaagctcgcgtgcagacgaagctccagaggcctggctgtcaggagggttcctccccgaggacacacacgcaacctcctggaccgccaggctttagacttttaaaacttccatatgcaggaaaccccacaggacgcagccagcatctcgggtcatgggtgcacctgtcaccgcagtcctgggctaaacagtgaacaggagctctgtgtctctgtggtcgttacagttgtagtgaatgttccctgggagagtcctcttcagaagatatttgcggtattttcaacaaaggactctccaggatggaggagcaactacaagtcaggaaggaaaaggctgacaacccagttttttaaaaaacgggcaaaggacgtgaacagacaccatgcaatggcccagagtgcacaaatcatcatttctcccaggaatggggtgcccgagcccccaggcggctgaacttgagacttgtcacgtagtgttggtggaatgcagagcagctggagatcacctgctgcaggtgggtgcgtaactccgcacggccaagccgtttggaaagctgtagcatatgcatgagagtccggaaagttccgagagaaagtgtgtggatgcacccgccaaggacacacccaccgaggccacagctgcgatttcatagtgtgggaccccactggcaaagacacgctggctgctgtggccgtggtttctgtcccagccgtctgtttccatagaaaaagacccgtgcctgtatattccacgctttgcgcacctgctggaattcggggagaagaaccacgaggtgtccatgactgccctgaggctcctacagaggatgaagcgggactggatgcacacaggccggcgcccctcgggcctctgcggagcagcgctcctggttgcagccagaatgcatgacttcaggaggactgtgaaggaggtcatcagtgtggtcaaagtgtgtgagtccacgctgcggaagaggctcacggaatttgaagacacccccaccagtcagttgaccattgatgagttcatgaagatcgacctggaggaggagtgcgaccccccctcgtacacagctgggcagaggaagctgcggatgaagcagcttgaacaagtcctgtcaaaaaaactggaggaggttgaaggtgaaatatccagttaccaggatgcaattgagattgaactagaaaacagccggccaaaggccaaggggggcctggccagcctggcaaaagatggctccaccgaggacaccgcgtccagcttgtgtggcgaggaggacacagaggacgaggagctggaagccgcggccagccacctgaacaaagacttataccgggagctccttggtggtgcccccggcagctcggaagcagcaggaagccccgagtggggcggcagacctccggccctggggtccctgctggaccccctccccactgcagccagcctgggcatctcagactccatccgcgaatgcatctcctctcagagcagcgaccccaaagatgcttcaggagacggtgagctggacctcagtggcattgatgacctggagattgacaggtacatcctgaatgagtcggaagcccgcgtgaaggccgagctgtggatgagggagaacgccgagtacctgcgggaacagagggaaaaagaagcaagaatagcgaaagagaaggagctcggcatctacaaggaacacaagcccaagaagtcttgcaagcgacgggagccaattcaggccagtaccgccagggaggccatcgagaagatgctggagcagaagaagatctccagcaagatcaattatagcgtgctccggggcctcagcagcgccggcgggggcagtccgcacagggaggatgcacagcccgagcatagcgccagtgccaggaagctgtcacgaaggaggacgccggccagcagaagtggggctgaccctgtgaccagtgtggggaaaaggttgaggcctctggtgtctacgcagccagcaaagaaggtggccacgggagaggctttgctcccaagctctcccaccctcggagctgagcctgccaggccccaggcggtgctggtggagagcgggcccgtgtcataccacgccgacgaggaggctgacgaggaggagcctgacgaggaggacggggagccctgcgtcagtgccctgcagatgatgggcagcaacgactatggctgtgatggcgatgaggacgacggctactgaagtgtggcctccaggcaggtgatgtcctggcagggggcctcgcgggtctcctcagcatcagacgggcttccaggaccgcagcaggcaggccccagcgccgagactcctggtgacaggtggcacctgtcccacagccctcgtcccatgtggaacttaccattgggattgtgtttctattcagcaagggaaaccggaccaagcgtctgcatgtgtgtgatcagatgtgggccgggtgtgtgcagggctgggtcccgctgcctgccgtcgactcatccaaggaccctccaaggctggcagtgtggtgttgctactattaaggaaacaggcttggggcagccccactgctggtccaagtgtgtggagggctgagtgtgctggccctgtgactcaggaccagctctggagtctccagcccaccctccgcaccgtcccctcctgagcagcactcggcgccagcagcctctgccagagtggaagccagagccctgcaggtgtccggcgcagccgtgggagctgaggatctggcacttgagaggcagcagctccttgaaggtcctctgcctccagctgtggccctgcatccagatacctgcctcgtccgaggcagacacccccacccctgcctcctccagacccccctccccgctgcctgcaccgcctggagcagcatgggggtcagacccctgctccagggccacttgagttgtgggcccaggagccctgcggctgccggcaggtgaactgagtgcccgacagctgagaccggcgcccacccgtcctgagcatagctctgtaggcagtgcgggcatagcctgcatagtgtcctggcgctgggagttccccgtggacagagccagagggcagtggcgctccctgtcagagctggatcaggccccccatcgaggagggagggcagacggaggcccgagagcctccccaggcctcttcgtgggaaggccccagtaccactcgtaggaggtctcagctctggcatggctgccccggatgtggccgagggggcttcaccctgtgtccttaggagggggtggccttgaggcagagccgtgcctcactgacccccaggggcctcatcctccccatggaatgggctgtatgtcctgccccaacttggcccgcagcaggccagacccccctacccccgcccagagctcagtagccagcctgggtcctgccagggcttctcgagggcttgggggaagaatagatttagtaaagcaggaagatctgttgttacttaacagaaaaaaaaaaaaaaaaaa

SEQ ID NO: 119 - DNA, 2355 bp, Homo sapiens
  prostaglandin E synthase 2 transcript variant 1 (PTGES2), chromosome 9 open reading frame 15 (C9orf15), GATE-binding factor 1 (GBF-1, GBF1), gamma-interferon-activated transcriptional element-binding factor 1
  CDS (746)...(1879): PTGES2
ctctcgggcgccgggcggggccatcccggggctgtccgcggagacgcctatgcggtggaggctccgggcttcagctagggcgggggagcccagcagaaggaccgagcagcctggcaccccactttgccatcctctccctggaaatctcggggtcggcgggccggccgcttcgcgtgggcgaaatcagagacacgtggtttccaaggccccttcgggttcgggaaaattttatggttcgggtcacagtaggaagcggacaatgaggcgggagggcagagagaaccgcaacacctggtgccgggtcgggtcgtttccggggctttcagtggccggaagtcgcggcgcctgtactgactctaggaagggctggagttgttttgaatgggcgcccgtaagagaggtgggcaagtacgtgttacagacggccacgccgccctttaggcggtcaaggtggggcgaggagacgttcgcccccctgcagtcggccgggtcactacccaagagcctttggaggcggaagcatggaacggtctgcaaacgttcccgagcgggcctctgcggctctggcgggcgtttcgaacttgggcgccgggcacacgcccagtcccgagagcgctgagggttcccttagcgtcgccctcaccccggccaacccgcggggcgccagagtcctggccctttaaacgccgcgcgtgcctcggcgtcttcgtttcgcgcgcccgcccgcggcgccggcggagcgaacatggacccggctgcgcgggtggtgcgggcgctgtggcctggtgggtgcgccttggcctggaggctgggaggccgcccccagccgctgctacccacgcagagccgggctggcttcgcgggggcggcgggcggcccgagccccgtggctgcagctcgtaaggggagcccgcggctgctgggagctgcggcgctggccctggggggagccctggggctgtaccacacggcgcggtggcacctgcgcgcccaggacctccacgcagagcgctcagccgcgcagctctccctgtccagccgcctgcagctgaccctgtaccagtacaagacgtgtcccttctgcagcaaggtccgagccttcctcgacttccatgccctgccctaccaggtggtggaggtgaaccctgtgcgcagggctgagatcaagttctcctcctacagaaaggtgcccatcctggtggcccaggaaggagaaagctcgcaacaactaaatgactcctctgtcatcatcagcgccctcaagacctacctggtgtcggggcagcccctggaagagatcatcacctactacccagccatgaaggctgtgaacgagcagggcaaggaggtgaccgagttcggcaataagtactggctcatgctcaacgagaaggaggcccagcaagtgtatggtgggaaggaggccaggacggaggagatgaagtggcggcagtgggcggacgactggctggtgcacctgatctcccccaatgtgtaccgcacgcccaccgaggctctggcgtcctttgactacattgtccgcgagggcaagttcggagccgtggagggtgccgtggccaagtacatgggtgcagcggccatgtacctcatcagcaagcgactcaagagcaggcaccgcctccaggacaacgtgcgcgaggacctctatgaggctgctgacaagtgggtggctgctgtgggcaaggaccggcccttcatggggggccagaagccgaatctcgctgatttggcggtgtatggcgtgctgcgtgtgatggaggggctggatgcgttcgatgacctgatgcagcacacgcacatccagccctggtacctgcgggtggagagggccatcaccgaggcctccccagcgcactgaatgtccccgcgcagagcagagggaaggcagcggaagacgccagctgccagggcctggggccactgggccagcgcctggcgatactggttgggggcaggatcattctgccccttgtccacgcacccccaccagccctctcgcttctaacacagggcacctgctggggctcagggatgttagggacgagttccagccctgccactgccctggggcgacccctccctgtccctgcctccctgctctgccgcccctcttcctggaccctcagtggctgtcccatggctacatcctgtgggtgggggccctcgacaggacagcaggacggtttgttttcagtggaatcccatccctgggttcccctggttcccactcttcccaagcctcccgggactgggacatgtttgcaataaaggaaaggtttgtggcgcctgtcatggcaggcatctcatggaaaaaaaaaaaaaaaaaaaaaaaaa

SEQ ID NO: 120 - DNA, 602 bp, Homo sapiens
  hypothetical protein LOC391356, chromosome 2 open reading frame 79 (C2orf79), peptidyl-tRNA hydrolase domain containing 1 (PTRHD1)
  CDS (6)...(428): C2orf79
ccaagatgcaccggggagtaggtccggcctttcgggtggtcaggaagatggcggcctctggggcggagccgcaggtcctggtacaatacttggtgttacgaaaggatctatcacaagctccgttctcctggccggcgggcgcactggtagcgcaggcttgtcacgcggccaccgcggccttgcacactcaccgcgaccacccgcacacagccgcttacctccaagagctggggcgcatgcgcaaagtggtcctcgaggccccagatgagaccaccctaaaggagctggccgagaccctgcaacagaagaacattgaccacatgctgtggcttgagcaaccagagaatatcgccacttgtattgctctccggccctaccccaaggaagaagtgggccagtatttgaagaagttccgattgttcaagtaactgctgctttgatgtgtttgaatacgcaggccacccattccaaagcatcatgtgttccttgcagtgtcagcttgctcccgtctttcagttgtgacaatttcttgagggttaagcacatgttcatattaaagttgtcattaataaaaaaaaaaaaaaaaaaaaaaaaaaaaaaaa

SEQ ID NO: 121 - DNA, 2487 bp, Homo sapiens
  phosphoglucomutase 1 transcript variant 1 (PGM1), glucose phosphomutase 1, CDG1T, GSD14
  CDS (214)...(1902): PGM1
cctttcccctcccgccggacctgccaggaggtgggctggcgcggagggagggccctgtcccctgtccctttaaggaggagggccaaacgccggcctagagtgcggcgtagcccccacccgccgtgccctcaccccagagcagctgcagcctcagccggccgcccctccgccagccaagtccgccgctctgacccccggcagcaagtcgccaccatggtgaagatcgtgacagttaagacccaggcgtaccaggaccagaagccgggcacgagcgggctgcggaagcgggtgaaggtgttccagagcagcgccaactacgcggagaacttcatccagagtatcatctccaccgtggagccggcgcagcggcaggaggccacgctggtggtgggcggggacggccggttctacatgaaggaggccatccagctcatcgctcgcatcgctgccgccaacgggatcggtcgcttggttatcggacagaatggaatcctctccacccctgctgtatcctgcatcattagaaaaatcaaagccattggtgggatcattctgacagccagtcacaacccagggggccccaatggagattttggaatcaaattcaatatttctaatggaggtcctgctccagaagcaataactgataaaattttccaaatcagcaagacaattgaagaatatgcagtttgccctgacctgaaagtagaccttggtgttctgggaaagcagcagtttgacttggaaaataagttcaaacccttcacagtggaaattgtggattcggtagaagcttatgctacaatgctgagaagcatctttgatttcagtgcactgaaagaactactttctgggccaaaccgactgaagatccgtattgatgctatgcatggagttgtgggaccgtatgtaaagaagatcctctgtgaagaactcggtgcccctgcgaactcggcagttaactgcgttcctctggaggactttggaggccaccaccctgaccccaacctcacctatgcagctgacctggtggagaccatgaagtcaggagagcatgattttggggctgcctttgatggagatggggatcgaaacatgattctgggcaagcatgggttctttgtgaacccttcagactctgtggctgtcattgctgccaacatcttcagcattccgtatttccagcagactggggtccgcggctttgcacggagcatgcccacgagtggtgctctggaccgggtggctagtgctacaaagattgctttgtatgagaccccaactggctggaagttttttgggaatttgatggacgcgagcaaactgtccctttgtggggaggagagcttcgggaccggttctgaccacatccgtgagaaagatggactgtgggctgtccttgcctggctctccatcctagccacccgcaagcagagtgtggaggacattctcaaagatcattggcaaaagtatggccggaatttcttcaccaggtatgattacgaggaggtggaagctgagggcgcaaacaaaatgatgaaggacttggaggccctgatgtttgatcgctcctttgtggggaagcagttctcagcaaatgacaaagtttacactgtggagaaggccgataactttgaatacagcgacccagtggatggaagcatttcaagaaatcagggcttgcgcctcattttcacagatggttctcgaatcgtcttccgactgagcggcactgggagtgccggggccaccattcggctgtacatcgatagctatgagaaggacgttgccaagattaaccaggacccccaggtcatgttggccccccttatttccattgctctgaaagtgtcccagctgcaggagaggacgggacgcactgcacccactgtcatcacctaagaagacaggcctgatgtggtacgtccctccacccccggacccatccaagtcatctgattgaagagcatgacagaaacaaaatgtattcaccaagcattttaggatttgactttttcactaaccagttgacgagcagtgcatttacaaggcactgccaaacaagatgcccttgggagctgtgagggaaagaggacctgcgggcttagatcaatctcaattccttttcatgccctcctgcattgctgctgcgtgggtatttgtctccttagccatcaggtacagtttacactacaatgtaagctataggtggagcatcagcagtgagtgaggccattcttcatccttaggatgtggcaatgaaatgatggtgcaagttcctttctcttttgtgaatctttccccccatttcctgtttacatgtaacccaacaaaatgcaatttctagtgccttctgtccaatcagttctttcctctgagtgagacgtacttggctacagatttctgccttgttttgcgacattgtcccattcacacagatattttgggataataaaggaaaataagctacaaaaaaaaaaaaaaaaa

SEQ ID NO: 122 - DNA, 2873 bp, Homo sapiens
  solute carrier family 19 (folate transporter), member 1 transcript variant 1 (SLC19A1), reduced folate carrier protein (RFC, REFC, RFC1), folate transporter 1 (FOLT), placental folate transporter, intestinal folate carrier 1 (IFC-1, IFC1)
  CDS (154)...(1929): SLC19A1
agccgcgcgcccgccgcgccgccttgtgggcgctgtagtcccggagtccgcgtgcgcggggccgggtccgggagccccagggcagccgccccgccgagtcgcaggcacagcgtcaccttcgtcccctccggagctgcacgtggcctgagcaggatggtgccctccagcccagcggtggagaagcaggtgcccgtggaacctgggcctgaccccgagctccggtcctggcggcacctcgtgtgctacctttgcttctacggcttcatggcgcagatacggccaggggagagcttcatcaccccctacctcctggggcccgacaagaacttcacgcgggagcaggtcacgaacgagatcacgccggtgctgtcgtactcctacctggccgtgctggtgcccgtgttcctgctcaccgactacctgcgctacacgccggtgctgctgctgcaggggctcagcttcgtgtcggtgtggctgctgctgctgctgggccactcggtggcgcacatgcagctcatggagctcttctacagcgtcaccatggccgcgcgcatcgcctattcctcctacatcttctctctcgtgcggcccgcgcgctaccagcgtgtggccggctactcgcgcgctgcggtgctgctgggcgtgttcaccagctccgtgctgggccagctgctggtcactgtgggccgagtctccttctccacgctcaactacatctcgctggccttcctcaccttcagcgtggtcctcgccctcttcctgaagcgccccaagcgcagcctcttcttcaaccgcgacgaccgggggcggtgcgaaacctcggcttcggagctggagcgcatgaatcctggcccaggcgggaagctgggacacgccctgcgggtggcctgtggggactcagtgctggcgcggatgctgcgggagctgggggacagcctgcggcggccgcagctgcgcctgtggtccctctggtgggtcttcaactcggccggctactacctggtggtctactacgtgcacatcctgtggaacgaggtggaccccaccaccaacagtgcgcgggtctacaacggcgcggcagatgctgcctccacgctgctgggcgccatcacgtccttcgccgcgggcttcgtgaagatccgctgggcgcgctggtccaagctgctcatcgcgggcgtcacggccacgcaggcggggctggtcttccttctggcgcacacgcgccacccgagcagcatctggctgtgctatgcggccttcgtgctgttccgcggctcctaccagttcctcgtgcccatcgccacctttcagattgcatcttctctgtctaaagagctctgtgccctggtcttcggggtcaacacgttctttgccaccatcgtcaagaccatcatcactttcattgtctcggacgtgcggggcctgggcctcccggtccgcaagcagttccagttatactccgtgtacttcctgatcctgtccatcatctacttcttgggggccatgctggatggcctgcggcactgccagcggggccaccacccgcggcagcccccggcccagggcctgaggagtgccgcggaggagaaggcagcacaggcactgagcgtgcaggacaagggcctcggaggcctgcagccagcccagagcccgccgctttccccagaagacagcctgggggctgtggggccagcctccctggagcagagacagagcgacccatacctggcccaggccccggccccgcaggcagctgaattcctgagcccagtgacaaccccttccccctgcactctgtgctccgcccaagcctcaggccctgaggctgcagatgagacttgtccccagctggctgtccatcctcctggtgtcagcaagctgggtttgcagtgtcttccaagcgacggtgttcagaatgtgaaccagtgactctcgggcgcccctgtggtaactttgcaggcggccctcagtgcatccccacgacccctgcctcgagggccgcctgccttagcaatgggggcctccgcttatcctgctagcaggccccctaggattccccctgccctgtgccgcactctggcggtggccacagcgtgctggcgacactcagggcagctgcctggccatgctgtccctgcactgtgccccgcgggctttgttgctggaagaggtgggtggtgggcttctgcgtccaccaggcctcactggctcatgccccttggggggcttgagacaaatcctttctgccccccagggctagtgaagtggcctcttggataccagctcaggggacactggccccacaggagttgtgagccctctagggcagggtgggagccgggaccctcaggtgtagctgagctgtgacattgctggtcatccttggtgctcttgcttttttgaaagatgctttttttttttttaactgacgtagaatgaagaactgcatgtggcttctctgtctctgtggaaaagccatctcaggttggcggcagacacattgtcatcagaggggagcagcggctctggtcctcggagctggttcctctctcccaccctaagggcagccctccatggtcctgtctgtccttctgaagtgtgtccatcctgacctgcgggtcctcagctgctcccacacttgtgccagcccggaggggactggtcccggtcaccgcggacgtgctggccttggtatgtgccaggcttgcctgggctgggcagccttgggggggctgcctttgtggtgggcgctggggaagtacgtcccagcggcctcagggtctaaggagcgctagtgccttgcccacaggtgcgggaccatctgatgtgatgtgaatactcttcccacatacattaaacacacttaagtgaga

SEQ ID NO: 123 - DNA, 5748 bp, Homo sapiens
  CD44 antigen transcript variant 1, hematopoietic cell E- and L-selectin ligand (HCELL), chondroitin sulfate proteoglycan 8 (CSPG8), GP90 lymphocyte homing/adhesion receptor, epican, Hermes antigen, extracellular matrix receptor III (ECMR-III)
  CDS (435)...(2663): CD44
gagaagaaagccagtgcgtctctgggcgcaggggccagtggggctcggaggcacaggcaccccgcgacactccaggttccccgacccacgtccctggcagccccgattatttacagcctcagcagagcacggggcgggggcagaggggcccgcccgggagggctgctacttcttaaaacctctgcgggctgcttagtcacagccccccttgcttgggtgtgtccttcgctcgctccctccctccgtcttaggtcactgttttcaacctcgaataaaaactgcagccaacttccgaggcagcctcattgcccagcggaccccagcctctgccaggttcggtccgccatcctcgtcccgtcctccgccggcccctgccccgcgcccagggatcctccagctcctttcgcccgcgccctccgttcgctccggacaccatggacaagttttggtggcacgcagcctggggactctgcctcgtgccgctgagcctggcgcagatcgatttgaatataacctgccgctttgcaggtgtattccacgtggagaaaaatggtcgctacagcatctctcggacggaggccgctgacctctgcaaggctttcaatagcaccttgcccacaatggcccagatggagaaagctctgagcatcggatttgagacctgcaggtatgggttcatagaagggcacgtggtgattccccggatccaccccaactccatctgtgcagcaaacaacacaggggtgtacatcctcacatccaacacctcccagtatgacacatattgcttcaatgcttcagctccacctgaagaagattgtacatcagtcacagacctgcccaatgcctttgatggaccaattaccataactattgttaaccgtgatggcacccgctatgtccagaaaggagaatacagaacgaatcctgaagacatctaccccagcaaccctactgatgatgacgtgagcagcggctcctccagtgaaaggagcagcacttcaggaggttacatcttttacaccttttctactgtacaccccatcccagacgaagacagtccctggatcaccgacagcacagacagaatccctgctaccactttgatgagcactagtgctacagcaactgagacagcaaccaagaggcaagaaacctgggattggttttcatggttgtttctaccatcagagtcaaagaatcatcttcacacaacaacacaaatggctggtacgtcttcaaataccatctcagcaggctgggagccaaatgaagaaaatgaagatgaaagagacagacacctcagtttttctggatcaggcattgatgatgatgaagattttatctccagcaccatttcaaccacaccacgggcttttgaccacacaaaacagaaccaggactggacccagtggaacccaagccattcaaatccggaagtgctacttcagacaaccacaaggatgactgatgtagacagaaatggcaccactgcttatgaaggaaactggaacccagaagcacaccctcccctcattcaccatgagcatcatgaggaagaagagaccccacattctacaagcacaatccaggcaactcctagtagtacaacggaagaaacagctacccagaaggaacagtggtttggcaacagatggcatgagggatatcgccaaacacccaaagaagactcccattcgacaacagggacagctgcagcctcagctcataccagccatccaatgcaaggaaggacaacaccaagcccagaggacagttcctggactgatttcttcaacccaatctcacaccccatgggacgaggtcatcaagcaggaagaaggatggatatggactccagtcatagtataacgcttcagcctactgcaaatccaaacacaggtttggtggaagatttggacaggacaggacctctttcaatgacaacgcagcagagtaattctcagagcttctctacatcacatgaaggcttggaagaagataaagaccatccaacaacttctactctgacatcaagcaataggaatgatgtcacaggtggaagaagagacccaaatcattctgaaggctcaactactttactggaaggttatacctctcattacccacacacgaaggaaagcaggaccttcatcccagtgacctcagctaagactgggtcctttggagttactgcagttactgttggagattccaactctaatgtcaatcgttccttatcaggagaccaagacacattccaccccagtggggggtcccataccactcatggatctgaatcagatggacactcacatgggagtcaagaaggtggagcaaacacaacctctggtcctataaggacaccccaaattccagaatggctgatcatcttggcatccctcttggccttggctttgattcttgcagtttgcattgcagtcaacagtcgaagaaggtgtgggcagaagaaaaagctagtgatcaacagtggcaatggagctgtggaggacagaaagccaagtggactcaacggagaggccagcaagtctcaggaaatggtgcatttggtgaacaaggagtcgtcagaaactccagaccagtttatgacagctgatgagacaaggaacctgcagaatgtggacatgaagattggggtgtaacacctacaccattatcttggaaagaaacaaccgttggaaacataaccattacagggagctgggacacttaacagatgcaatgtgctactgattgtttcattgcgaatcttttttagcataaaattttctactctttttgttttttgtgttttgttctttaaagtcaggtccaatttgtaaaaacagcattgctttctgaaattagggcccaattaataatcagcaagaatttgatcgttccagttcccacttggaggcctttcatccctcgggtgtgctatggatggcttctaacaaaaactacacatatgtattcctgatcgccaacctttcccccaccagctaaggacatttcccagggttaatagggcctggtccctgggaggaaatttgaatgggtccattttgcccttccatagcctaatccctgggcattgctttccactgaggttgggggttggggtgtactagttacacatcttcaacagaccccctctagaaatttttcagatgcttctgggagacacccaaagggtgaagctatttatctgtagtaaactatttatctgtgtttttgaaatattaaaccctggatcagtcctttgatcagtataattttttaaagttactttgtcagaggcacaaaagggtttaaactgattcataataaatatctgtacttcttcgatcttcaccttttgtgctgtgattcttcagtttctaaaccagcactgtctgggtccctacaatgtatcaggaagagctgagaatggtaaggagactcttctaagtcttcatctcagagaccctgagttcccactcagacccactcagccaaatctcatggaagaccaaggagggcagcactgtttttgttttttgttttttgttttttttttttgacactgtccaaaggttttccatcctgtcctggaatcagagttggaagctgaggagcttcagcctcttttatggtttaatggccacctgttctctcctgtgaaaggctttgcaaagtcacattaagtttgcatgacctgttatccctggggccctatttcatagaggctggccctattagtgatttccaaaaacaatatggaagtgccttttgatgtcttacaataagagaagaagccaatggaaatgaaagagattggcaaaggggaaggatgatgccatgtagatcctgtttgacatttttatggctgtatttgtaaacttaaacacaccagtgtctgttcttgatgcagttgctatttaggatgagttaagtgcctggggagtccctcaaaaggttaaagggattcccatcattggaatcttatcaccagataggcaagtttatgaccaaacaagagagtactggctttatcctctaacctcatattttctcccacttggcaagtcctttgtggcatttattcatcagtcagggtgtccgattggtcctagaacttccaaaggctgcttgtcatagaagccattgcatctataaagcaacggctcctgttaaatggtatctcctttctgaggctcctactaaaagtcatttgttacctaaacttatgtgcttaacaggcaatgcttctcagaccacaaagcagaaagaagaagaaaagctcctgactaaatcagggctgggcttagacagagttgatctgtagaatatctttaaaggagagatgtcaactttctgcactattcccagcctctgctcctccctgtctaccctctcccctccctctctccctccacttcaccccacaatcttgaaaaacttcctttctcttctgtgaacatcattggccagatccattttcagtggtctggatttctttttattttcttttcaacttgaaagaaactggacattaggccactatgtgttgttactgccactagtgttcaagtgcctcttgttttcccagagatttcctgggtctgccagaggcccagacaggctcactcaagctctttaactgaaaagcaacaagccactccaggacaaggttcaaaatggttacaacagcctctacctgtcgccccagggagaaaggggtagtgatacaagtctcatagccagagatggttttccactccttctagatattcccaaaaagaggctgagacaggaggttattttcaattttattttggaattaaatacttttttccctttattactgttgtagtccctcacttggatatacctctgttttcacgatagaaataagggaggtctagagcttctattccttggccattgtcaacggagagctggccaagtcttcacaaacccttgcaacattgcctgaagtttatggaataagatgtattctcactcccttgatctcaagggcgtaactctggaagcacagcttgactacacgtcatttttaccaatgattttcaggtgacctgggctaagtcatttaaactgggtctttataaaagtaaaaggccaacatttaattattttgcaaagcaacctaagagctaaagatgtaatttttcttgcaattgtaaatcttttgtgtctcctgaagacttcccttaaaattagctctgagtgaaaaatcaaaagagacaaaagacatcttcgaatccatatttcaagcctggtagaattggcttttctagcagaacctttccaaaagttttatattgagattcataacaacaccaagaattgattttgtagccaacattcattcaatactgttatatcagaggagtaggagagaggaaacatttgacttatctggaaaagcaaaatgtacttaagaataagaataacatggtccattcacctttatgttatagatatgtctttgtgtaaatcatttgttttgagttttcaaagaatagcccattgttcattcttgtgctgtacaatgaccactgttattgttactttgacttttcagagcacacccttcctctggtttttgtatatttattgatggatcaataataatgaggaaagcatgatatgtatattgctgagttgaaagcacttattggaaaatattaaaaggctaacattaaaagactaaaggaaacagaaaaaaaaaaaaaaaaa

SEQ ID NO: 124 - DNA, 579 bp, Homo sapiens
  60S ribosomal protein L24, L24, ribosomal protein L30, epididymis secretory protein Li 310 (HEL-S-310)
  CDS (44)...(517): RPL24
tctttcttttcgccatcttttgtctttccgtggagctgtcgccatgaaggtcgagctgtgcagttttagcgggtacaagatctaccccggacacgggaggcgctacgccaggaccgacgggaaggttttccagtttcttaatgcgaaatgcgagtcggctttcctttccaagaggaatcctcggcagataaactggactgtcctctacagaaggaagcacaaaaagggacagtcggaagaaattcaaaagaaaagaacccgccgagcagtcaaattccagagggccattactggtgcatctcttgctgatataatggccaagaggaatcagaaacctgaagttagaaaggctcaacgagaacaagctatcagggctgctaaggaagcaaaaaaggctaagcaagcatctaaaaagactgcaatggctgctgctaaggcacctacaaaggcagcacctaagcaaaagattgtgaagcctgtgaaagtttcagctccccgagttggtggaaaacgctaaactggcagattagatttttaaataaagattggattataactctagaaaaaaaaaaaaaaaaa

SEQ ID NO: 125 - DNA, 3749 bp, Homo sapiens
  nicalin precursor (NCLN), nicastrin-like protein; nicalin homolog (zebrafish), NET59
  CDS (155)...(1846): NCLN
gcggtgcccacaggacctcagggcgagtgcgggctgccccgcgcggcgcccgcaggaccccggcggctacccatgccgaggtgagtccgcgggagccgccgccgccgccgtcccgtcccagctgccgccccgcgcggccccgccgccggccaggatgctggaggaagcgggcgaggtgctggagaacatgctgaaggcgtcttgtctgccgctcggcttcatcgtcttcctgcccgctgtgctgctgctggtggcgccgccgctgcctgccgccgacgccgcgcacgagttcaccgtgtaccgcatgcagcagtacgacctgcagggccagccctacggcacacggaatgcagtgctgaacacggaggcgcgcacgatggcggcggaggtgctgagccgccgctgcgtgctcatgcggctactggacttctcctacgagcagtaccagaaggccctgcggcagtcggcgggcgccgtggtcatcatcctgcccagggccatggccgccgtgccccaggacgtcgtccggcaattcatggagatcgagccggagatgctggccatggagaccgccgtccccgtgtactttgccgtggaggacgaggccctgctgtctatctacaagcagacccaggctgcctccgcctcccagggctccgcctctgctgctgaagtactgctgcgcacggccactgccaacggcttccagatggtcaccagcggggtacagagcaaggccgtgagtgactggctgattgccagcgtggaggggcggctgacggggctgggcggagaggaccttcccaccatcgtcatcgtggcccactacgacgcctttggagtggccccctggctgtcgctgggcgcggactccaacgggagcggcgtctctgtgctgctggagctggcacgcctcttctcccggctctacacctacaagcgcacgcacgccgcctacaacctcctgttctttgcgtctggaggaggcaagtttaactaccagggaaccaagcgctggctggaagacaacctggaccacacagactccagcctgcttcaggacaatgtggccttcgtgctgtgcctggacaccgtgggccggggcagcagcctgcacctgcacgtgtccaagccgcctcgggagggcaccctgcagcacgccttcctgcgggagctggagacggtggccgcgcaccagttccctgaggtacggttctccatggtgcacaagcggatcaacctggcggaggacgtgctggcctgggagcacgagcgcttcgccatccgccgactgcccgccttcacgctgtcccacctggagagccaccgtgacggccagcgcagcagcatcatggacgtgcggtcccgggtggattctaagaccctgacccgtaacacgaggatcattgcagaggccctgactcgagtcatctacaacctgacagagaaggggacacccccagacatgccggtgttcacagagcagatgcagatccagcaggagcagctggactcggtgatggactggctcaccaaccagccgcgggccgcgcagctggtggacaaggacagcaccttcctcagcacgctggagcaccacctgagccgctacctgaaggacgtgaagcagcaccacgtcaaggctgacaagcgggacccagagtttgtcttctacgaccagctgaagcaagtgatgaatgcgtacagagtcaagccggccgtctttgacctgctcctggctgttggcattgctgcctacctcggcatggcctacgtggctgtccagcacttcagcctcctctacaagaccgtccagaggctgctcgtgaaggccaagacacagtgacacagccacccccacagccggagcccccgccgctccacagtccctggggccgagcacgagtgagtggacactgccccgccgcgggcggccctgcagggacaggggccctctccctccccggcggtggttggaacactgaattacagagcttttttctgttgctctccgagactggggggggattgtttcttcttttccttgtctttgaacttccttggaggagagcttgggagacgtcccggggccaggctacggacttgcggacgagccccccagtcctgggagccggccgccctcggtctggtgtaagcacacatgcacgattaaagaggagacgccgggaccccctgcccgatcgcgcgcggcctccgcccaccgcctcctgccgcaaggggcctggactgcaggcctgacctgctccctgctccgtgtctgtcctaggacgtcccctcccgctccccgatggtggcgtggacatggttatttatctctgctccttcttgcctggaggagggcagtgccagccctggggttctgggattccagccctcctggagccttttgttccccatgtggtctcagtgacccgtccccctgacagtgggctcggggagctgcatcacccagccttccccttctccgactgcagggtctgatgtcatcattgacagcctttgcttcgtgggggcctggcagggcccctgcctccccgacccccgacccactgcaaatccccgttcccctgcactcctcttctcccagcccatccctccggcccctgtgcctctgcggccccagcccagctcccagggccgtcacctgcttggccctggcccagctccctgccctgagtcctgagccagtgcctggtgtttcctgggctcggtactgggcccccaggccatccaggctttgccacggccagttggtcctccctggggaactgggtgcgggtggagtactgggaggcaggaggtggcccggggaggccttgtggctcctcccctcgctcctcgccctgggcctcagcttcctcatcaatagaaaggatgtgttcggggtgggggcgtcaggtgagaacgtttgctgggaaggagaggacttggggcatggcctctggggccacccttcctggaactcagagaggaaggtccgggccctcgggaagccttggacagaaccctccaccccgcagaccaggcgtcgtgtgtgtgtgggagagaaggaggcccgtgttgagctcagggagaccccggtgtgtccgttctttagcaatataacctacccagtgcgtgccgagcaggcttggtggggaagggacttgagctgggcaagtcctggcctggcacccgcagccgtctcccttccgtggcccagggaggtgtttgctgtccgaaggacctgggccggcccatgggagcctggggttctgtccagataggaccagggggtctcactttggccaccagttcttcggccagcacctctgccctccagaacctgcagcctggaggggtgaggggacaaccacccctctttcctccaggttggcaggggaccctcttctcccgtctgccctgcgggttgcccgcctcctccagagacttgcccaagggcccatcaccactggcctctgggcacttgtgctgagactctgggacccaggcagctgccaccttgtcaccatgagagaatttggggagtgcttgcatgctagccagcaggctcctgtctgggtgccacggggccagcattttggagggagcttccttccttccttcctggacaggtcgtcatgatggatgcactgactgaccgtctggggctcaggctggtgtgggatgcagccggccgatgagaaaataaagccatattgaatgatcgccaaaaaaaaaaaaaaaaa

SEQ ID NO: 126 - DNA, 2350 bp, Homo sapiens
  60S ribosomal protein L15 transcript variant 1, L15, DBA12, EC45, RPL10, RPLY10, RPYL10
  CDS (381)...(995): RPL15
aaagacagcggctccaccgcggtacgcggccaccggctttggagcctggaccccaacttgcctcctctcgcggagagacagtcgccgacgctcgcttagccgccgagacctcgccgccaactctctcacctctcgagacgcccaggccgctcaggctcgaatcttgcggagcagggggcgggacaatagcggccgcggcgccccactcggcagaactccgccaccaggcgcgatgccggaactacatgtcccatgacgctctgggaggccgcagctttccaccggaaagagggtggctgaggtgggggaggagcccaaaaggcattgtgggagtacagctctttcctttccgtctggcggcagccatcaggtaagccaagatgggtgcatacaagtacatccaggagctatggagaaagaagcagtctgatgtcatgcgctttcttctgagggtccgctgctggcagtaccgccagctctctgctctccacagggctccccgccccacccggcctgataaagcgcgccgactgggctacaaggccaagcaaggttacgttatatataggattcgtgttcgccgtggtggccgaaaacgcccagttcctaagggtgcaacttacggcaagcctgtccatcatggtgttaaccagctaaagtttgctcgaagccttcagtccgttgcagaggagcgagctggacgccactgtggggctctgagagtcctgaattcttactgggttggtgaagattccacatacaaattttttgaggttatcctcattgatccattccataaagctatcagaagaaatcctgacacccagtggatcaccaaaccagtccacaagcacagggagatgcgtgggctgacatctgcaggccgaaagagccgtggccttggaaagggccacaagttccaccacactattggtggctctcgccgggcagcttggagaaggcgcaatactctccagctccaccgttaccgctaatataagtaaagtttgtaaaattcatacttaataaacaatttaggacagtcatgtctgcttacaggtgttatttgtctgttaaaactagtctgcagatgtttcttgaatgctttgtcaaattaagaaagttaaagtgcaataatgtttgaagacaataagtggtggtgtatcttgtttctaataagataaacttttttgtctttgctttatcttattagggagttgtatgtcagtgtataaaacatactgtgtggtataacaggcttaataaattctttaaaaggagagaactgaaactagccctgtagatttgtctggtgcatgtgatgaaacctgcagctttatcggagtgatggcaatgctctgctggtttattttcaagtggctgcgttttttttagtttggcaggtgtagactttttaagttgggctttagaaaatctgggttagcctgaagaaaattgcctcagcctccacagtaccattttaaattcacataaaaggtgaaagctcctggttcagtgccatggcttcatggcattcagtgattagtggtaatggtaaacactggtgtgttttgaagttgaatgtgcgataaaattattagccttaagattggtaagctagcaatgaatgctagggtgggaagctggtgagccagtggccattagataaatacctttcaagtgtgagcttagacgtcaaccctaaaatacttaaccgtaatgctaattgtgatcattatgaatcccttcagtcacattagggggaaagtagttggctataagtacgtcattcttagtccagtcagtcttaaaaacatcttgggttacccactctgtccactcccataggctacagaaaaagtcacaagcgcatggtttccaaccatatgtgttttctgcagttatttctcttgttctggccaaacaaccctaaaaatccttaccattccacaaagttggaccatcacttgtgcacccactttgactatgagtataccaccacattgcatttctgtttgcaccatgtcttccaggagactagactactgttgtccagggtcaatttgagtgtaaagaaaatgtagacaaggaattgcccaattttaaattctgactttgctgacttaatttaaatgctcgttctgaaccaattttctcctatcttctctaggggtttcaaaagactcagttaattgatttccaggaagtactcatagcaagttcataaaagttcttgagacctaaatttcttcacaaaaaaagaaaagatcttaagtcatacattttaattgtgtagaggttgttcaactgaaggaataaatgtctattaaactaaaacaaatggaccttc

SEQ ID NO: 127 - DNA, 2531 bp, Homo sapiens
  cleft lip and palate transmembrane protein 1 transcript variant 2 (CLPTM1)
  CDS (55)...(2064): CLPTM1
gaagtcggggacggggcggggctggcggcgggggcggggacccggagcgggaagatggcggcggcgcaggaggcggacggggcccgcagcgccgtggtggcggccgggggaggcagctccggtcaggtgaccagcaatggcagcatcgggagggacccgccagcggagacccagcctcagaacccaccggcccagccggcacccaatgcctggcaggtcatcaaaggtgtgctgtttaggatcttcatcatctgggccatcagcagttggttccgccgagggccggcccctcaggaccaggcgggccccggaggagctccacgcgtcgccagccgcaacctgttccccaaagacactttaatgaacctgcatgtgtacatctcagagcacgagcactttacagacttcaacgccacgtcggcactcttctgggaacagcacgatcttgtgtatggcgactggactagcggcgagaactcagacggctgctacgagcactttgctgagctcgatatcccacagagcgtccagcagaacggctccatctacatccacgtttacttcaccaagagtggcttccacccagacccccggcagaaggccctgtaccgccggcttgccacagtccacatgtcccggatgatcaacaaatacaagcgcagacgatttcagaaaaccaagaacctgctgacaggagagacagaagcggacccagaaatgatcaagagggctgaggactatgggcctgtggaggtgatctcccattggcaccccaacatcaccatcaacatcgtggacgaccacacgccgtgggtgaagggcagtgtgccccctcccctggatcaatatgtgaagttcgacgccgtgagcggtgactactatcccatcatctacttcaatgactactggaacctgcagaaggactactaccccatcaacgagagcctggccagcctgccgctccgcgtctccttctgcccactctcgctttggcgctggcagctctatgctgcccagagcaccaagtcgccctggaacttcctgggtgatgagttgtacgagcagtcagatgaggagcaggactcggtgaaggtggccctgctggagaccaacccctacctgctggcgctcaccatcatcgtgtctatcgttcacagtgtcttcgagttcctggccttcaagaatgatatccagttctggaacagccggcagtccctggagggcctgtccgtgcgctccgtcttcttcggcgttttccagtcattcgtggtcctcctctacatcctggacaacgagaccaacttcgtggtccaggtcagcgtcttcattggggtcctcatcgacctctggaagatcaccaaggtcatggacgtccggctggaccgagagcacagggtggcaggaatcttcccccgcctatccttcaaggacaagtccacgtatatcgagtcctcgaccaaagtgtatgatgatatggcattccggtacctgtcctggatcctcttcccgctcctgggctgctatgccgtctacagtcttctgtacctggagcacaagggctggtactcctgggtgctcagcatgctctacggcttcctgctgaccttcggcttcatcaccatgacgccccagctcttcatcaactacaagctcaagtctgtggcccaccttccctggcgcatgctcacctacaaggccctcaacacattcatcgacgacctgttcgcctttgtcatcaagatgcccgttatgtaccggatcggctgcctgcgggacgatgtggttttcttcatctacctctaccaacggtggatctaccgcgtcgaccccacccgagtcaacgagtttggcatgagtggagaagaccccacagctgccgcccccgtggccgaggttcccacagcagcaggggccctcacgcccacacctgcacccaccacgaccaccgccaccagggaggaggcctccacgtccctgcccaccaagcccacccagggggccagctctgccagcgagccccaggaagcccctccaaagccagcagaggacaagaaaaaggattagtcgagactggtcctcacctgctccggctcctggcgaccactacccctgcgtcccggccccctcgcctcccctccctgtcgccctttccctggacagatcaggccggggcggtgggaggcccgcctcaggtcagggcccagcgtgtgatgtaggggccggggcaggccagggtttgtttgtggaggcgctgtctgtccctctgtccctctgtgtttccagccatctcgccctgccagcccagcaccactgggaatcatggtgaagctgatgcagcgttgccgagggggtgggttgggcgggggtggggccgggcccccctacgggatgcccacggccgttcatcatcttgtccctcgtccccctaccacactccccctcctagaccgccgccctttaacacagtctggatttaataaattcatatgggtgtttaacttaaactcagcactaaaaaaaaaaaaaaaaaa

SEQ ID NO: 128 - DNA, 1710 bp, Homo sapiens
  evolutionarily conserved signaling intermediate in Toll pathway, mitochondrial precursor transcript variant 1 (ECSIT), SITPEC
  CDS (135)...(1430): ECSIT
gatttgctacctccctggagctccctgacccggacgctctctgggccaatatggcagcgcccagcaacaagacagagctggcctggagtccgcggctggccgcgtgagtaggtgattgtctgacaagcagaggcatgagctgggtccaggccaccctactggcccgaggcctctgtagggcctggggaggcacctgcggggccgccctcacaggaacctccatctctcaggtccctcgccggctccctcggggcctccactgcagcgcagctgcccatagctctgaacagtccctggttcccagcccaccggaaccccggcagaggcccaccaaggctctggtgccctttgaggacctgtttgggcaggcgcctggtggggaacgggacaaggcgagcttcctgcagacggtgcagaaatttgcggagcacagcgtgcgtaagcggggccacattgacttcatctacctggccctgcgcaagatgcgggagtatggtgtcgagcgggacctggctgtgtacaaccagctgctcaacatcttccccaaggaggtcttccggcctcgcaacatcatccagcgcatcttcgtccactaccctcggcagcaggagtgtgggattgctgtcctggagcagatggagaaccacggtgtgatgcccaacaaggagacggagttcctgctgattcagatctttggacgcaaaagctaccccatgctcaagttggtgcgcctgaagctgtggttccctcgattcatgaacgtcaaccccttcccagtgccccgggacctgccccaggaccctgtggagctggccatgtttggcctgcggcacatggagcctgaccttagtgccagggtcaccatctaccaggttcctttgcccaaagactcaacaggtgcagcagatcccccccagccccacatcgtaggaatccagagtcccgatcagcaggccgccctggcccgccacaatccagcccggcctgtctttgttgagggccccttctccctgtggctccgcaacaagtgtgtgtattaccacatcctcagagctgacttgctgcccccggaggagagggaagtggaagagacgccggaggagtggaacctctactacccgatgcagctggacctggagtatgtgaggagtggctgggacaactacgagtttgacatcaatgaagtggaggaaggccctgtcttcgccatgtgcatggcgggtgctcatgaccaggcgacgatggctaagtggatccagggcctgcaggagaccaacccaaccctggcccagatccccgtggtcttccgcctcgccgggtccacccgggagctccagacatcctctgcagggctggaggagccgcccctgcccgaggaccaccaggaagaagacgacaacctgcagcgacagcagcagggccagagctagtctgagccggcgcgagggcacgggctgtggcccgaggaggcggtggactgaaggcatgagatgccctttgagtgtacagcaaatcaatgttttcctgcttggggctctcttccctcatctctagcagtatggcatcccctccccaggatctcgggctgccagcgatgggcaggcgagacccctccagaatctgcaggcgcctctggttctccgaattcaaataaaaaggggcgggagcgctgttggttgtgcgcatgcgcagtttccaaaaaaaaaaaaa

SEQ ID NO: 129 - DNA, 854 bp, Homo sapiens
  eukaryotic translation elongation factor 1 beta 2 transcript variant 2 (EEF1B2), elongation factor 1-beta (EF1B, EEF1B, EF-1-beta), eukaryotic translation elongation factor 1 beta 1 (EEF1B1)
  CDS (113)...(790): EEF1B2
gccggaagtggccccagcctcgaggccgggcgtcttcggtcatctccggcgcttctagggctggttcccgtcatcttcgggagccgtggagctctcggatacagccgacaccatgggtttcggagacctgaaaagccctgccggcctccaggtgctcaacgattacctggcggacaagagctacatcgaggggtatgtgccatcacaagcagatgtggcagtatttgaagccgtgtccagcccaccgcctgccgacttgtgtcatgccctacgttggtataatcacatcaagtcttacgaaaaggaaaaggccagcctgccaggagtgaagaaagctttgggcaaatatggtcctgccgatgtggaagacactacaggaagtggagctacagatagtaaagatgatgatgacattgacctctttggatctgatgatgaggaggaaagtgaagaagcaaagaggctaagggaagaacgtcttgcacaatatgaatcaaagaaagccaaaaaacctgcacttgttgccaagtcttccatcttactagatgtgaaaccttgggatgatgagacagatatggcgaaattagaggagtgcgtcagaagcattcaagcagacggcttagtctggggctcatctaaactagttccagtgggatacggaattaagaaacttcaaatacagtgtgtagttgaagatgataaagttggaacagatatgctggaggagcagatcactgcttttgaggactatgtgcagtccatggatgtggctgctttcaacaagatctaaaatccatcctggatcatggcatttaaataaaagattgaaagattacaaaaaaaaaaaaaaaaaa

SEQ ID NO: 130 - DNA, 743 bp, Homo sapiens
  prefoldin subunit 5 transcript variant 1 (PFDN5, PFD5), c-myc binding protein, myc modulator-1 (MM-1, MM1)
  CDS (118)...(582): PFDN5
gaggatcatagagctgtctggcgcagcgaggcctcccggcgccaccgagacgcgcagaggacggctagagcgttgctcgccgagagacttcctcttcgttaagtcggccttcccaacatggcgcagtctattaacatcacggagctgaatctgccgcagctagaaatgctcaagaaccagctggaccaggaagtggagttcttgtccacgtccattgctcagctcaaagtggtacagaccaagtatgtggaagccaaggactgtctgaacgtgctgaacaagagcaacgaggggaaagaattactcgtcccactgacgagttctatgtatgtccctgggaagctgcatgatgtggaacacgtgctcatcgatgtgggaactgggtactatgtagagaagacagctgaggatgccaaggacttcttcaagaggaagatagattttctaaccaagcagatggagaaaatccaaccagctcttcaggagaagcacgccatgaaacaggccgtcatggaaatgatgagtcagaagattcagcagctcacagccctgggggcagctcaggctactgctaaggcctgagagtttttgcagaaatggggcagagggacaccctttgggcgtggcttcctggtgatgggaagggtcttgtgttttaatgccaataaatgtgccagctgggcagaaaaaaaaaaaaaaaaaaaaaaaaaaaaaaaaaaaaaaaaaaaaaaaaaaaaaaaaaa

SEQ ID NO: 131 - DNA, 1721 bp, Homo sapiens
  polynucleotide kinase 3'-phosphatase (PNKP, PNK), bifunctional polynucleotide phosphatase/kinase, DNA 5'-kinase/3'-phosphatase, EIEE10, MCSZ
  CDS (111)...(1676): PNKP
ccgaggaaccgaccgccgccggccgggttgcaggcggggcacctcgggcaggacctccctggtcggaagtggccgtgagcccaagccgcggtcccgggccggcacccaggatgggcgaggtggaggccccgggccgcttgtggctcgagagcccccctgggggagcgccccccatcttcctgccctcggacgggcaagccctggtcctgggcaggggacccctgacccaggttacggaccggaagtgctccagaactcaagtggagctggtcgcagatcctgagacccggacagtggcagtgaaacagctgggagttaacccctcaactaccgggacccaggagttgaagccggggttggagggctctctgggggtgggggacacactgtatttggtcaatggcctccacccactgaccctgcgctgggaagagacccgcacaccagaatcccagccagatactccgcctggcacccctctggtgtcccaagatgagaagagagatgctgagctgccgaagaagcgtatgcggaagtcaaaccccggctgggagaacttggagaagttgctagtgttcaccgcagctggggtgaaaccccagggcaaggtggctggctttgatctggacgggacgctcatcaccacacgctctgggaaggtctttcccactggccccagtgactggaggatcttgtacccagagattccccgtaagctccgagagctggaagccgagggctacaagctggtgatcttcaccaaccagatgagcatcgggcgcgggaagctgccagccgaggagttcaaggccaaggtggaggctgtggtggagaagctgggggtccccttccaggtgctggtggccacgcacgcaggcttgtaccggaagccggtgacgggcatgtgggaccatctgcaggagcaggccaacgacggcacgcccatatccatcggggacagcatctttgtgggagacgcagccggacgcccggccaactgggccccggggcggaagaagaaagacttctcctgcgccgatcgcctgtttgccctcaaccttggcctgcccttcgccacgcctgaggagttctttctcaagtggccagcagccggcttcgagctcccagcctttgatccgaggactgtctcccgctcagggcctctctgcctccccgagtccagggccctcctgagcgccagcccggaggtggttgtcgcagtgggattccctggggccgggaagtccacctttctcaagaagcacctcgtgtcggccggatatgtccacgtgaacagggacacgctaggctcctggcagcgctgtgtgaccacgtgtgagacagccctgaagcaagggaaacgggtcgccatcgacaacacaaacccagacgccgcgagccgcgccaggtacgtccagtgtgcccgagccgcgggcgtcccctgccgctgcttcctcttcaccgccactctggagcaggcgcgccacaacaaccggtttcgagagatgacggactcctctcatatccccgtgtcagacatggtcatgtatggctacaggaagcagttcgaggccccaacgctggctgaaggcttctctgccatcctggagatcccgttccggctatgggtggagccgaggctggggcggctgtactgccagttctccgagggctgagccccgcccagctcccctccacaataaacgctgtttctccttgag

SEQ ID NO: 132 - DNA, 2889 bp, Homo sapiens
  septin 8 transcript variant 1 (SEPT8), SEP2
  CDS (239)...(1690): SEPT8
gcggcggggctccggctgcgctcgtggccgggccgggcggggaggccggtcccgcgggcgggggcaggggcggctccgcggcttctcccgccgccgccgccaaggggagtttccaggaagtggccatattggatccattcagccgcagccgcccgggcggagcgcgtcccgcagccggctggtccctgtcgctgcccctgcgctcgtcccagcccacccgcccggtgcggagctcgccatggcggccaccgacctggagcgcttctcgaatgcagagccagagccccggagcctctccctgggcggccatgtgggtttcgacagcctccccgaccagctggtcagcaagtcggtcactcagggcttcagcttcaacatcctctgtgtgggggagaccggcattggcaaatccacactgatgaacacactcttcaacacgaccttcgagactgaggaagccagtcaccatgaggcatgcgtgcgcctgcggccccagacctatgacctccaggagagcaacgtgcagctcaagctgaccattgtggatgccgtgggctttggggatcagatcaataaggatgagagttacaggcccatagttgactacatcgatgcgcagtttgaaaattatctgcaggaggagctgaagatccgccgctcgctcttcgactaccatgacacaaggatccacgtttgcctctacttcatcacgcccacagggcactccctgaagtctctagatctagtgaccatgaagaaactagacagcaaggtgaacattattcccatcatcgccaaggctgacaccatctccaagagcgagctccacaagttcaagatcaagatcatgggcgagttggtcagcaacggggtccagatctaccagttccccacggatgatgaggctgttgcagagattaacgcagtcatgaatgcacatctgccctttgccgtggtgggcagcaccgaggaggtgaaggtggggaacaagctggtccgagcacggcagtacccctggggagtggtgcaggtggagaatgagaatcactgcgacttcgtgaagctgcgggagatgttgatccgggtgaacatggaagacctccgcgagcagacccacagccggcactacgagctctaccggcgctgcaagttggaggagatgggctttcaggacagcgatggtgacagccagcccttcagcctacaagagacatacgaggccaagaggaaggagttcctaagtgagctgcagaggaaggaggaagagatgaggcagatgtttgtcaacaaagtgaaggagacagagctggagctgaaggagaaggaaagggagctccatgagaagtttgagcacctgaagcgggtccaccaggaggagaagcgcaaggtggaggaaaagcgccgggaactggaggaggagaccaacgccttcaatcgccggaaggctgcggtggaggccctgcagtcgcaggccttgcacgccacctcgcagcagcccctgaggaaggacaaggacaagaagaacagatcagatataggagcacaccagccgggcatgagcctctccagctctaaggtgatgatgaccaaggccagtgtggagcccttgaactgcagcagctggtggcccgccatacagtgctgcagctgcctggtcagggatgcgacgtggagggaaggattcctctgaggcagcagctccaacacatggggccagctcaggaccaccagggcatggaactggagaccatggtttttaatgttagaacagaaaacgccatacttttcctatatcaatgatcaaaagtgcaaacaatttaaatttccatcagggaacatcaaatgttgcccaacccttttcattcctatccatggctccgtaaggggcttgaggcttaatgcccatcctgtggccaagctgagcttccactccgggaccaaaaaaaaaaaaaagtctgctttgtgacatcatcgttatgagcggaaagtacctagatgacaatgtttccattctgaaaaatagaaacatactattcaagaccaaggtagcagaaaagttacttgtatctgcttatcataagacgaaactctgcaacttggcaacggtggccagttttcgtaatgaaacagtctttagtaatttaatcttcatgcttcataacaaaccaaaaccccatgagatttccacattgcataattttgccttactaacagaatcatatccttaaggatgaccatcattcccccaactaaaacaaatacaaactaatgtatgatatttttttaagtgccagatcaatatggtctaaagcttcaataaggattgtgtgtaggtgaataaagacagctaagtgaatgtgtgtaaagtgtagcaaaagcagacagatatttatgtacagtattcatagaatggaaagttaaatatttttgcagtgtgtatttaaaagagaaactcaccataatagtgccgtctaaaaatctttgtaaagttaatttaatgtcctttagaagtgggagtctggtggaactgtgttggatttaagataccttttcactcttccgtatgtcatgagccttgtgcgtcacctcactgtggtgcatgtgcaagggcgtgtgcacgcctgtgctttgccatcccatgttgtaaacagctgttccaaaggcacaaacgagtttagggtagactctgtaaacacctccttactcactatagtcaagaagtccagcggcgtcccaatatagaggtcccagtgcagtctgtccagaatagccagctccatcctcagcagctcattcggggaatagtcagagccatagtgctttgtgaagtcttttacttgtggaataaactgtaaaaagaaaataaagaggccaaagccctacatcatg

SEQ ID NO: 133 - DNA, 1397 bp, Homo sapiens
  cold inducible RNA binding protein transcript variant 1 (CIRBP, CIRP), glycine-rich RNA binding protein, A18 hnRNP
  CDS (150)...(668): CIRBP
aggatgtgtagggggcggggcccggcggaagcgtatataaggccgggctcggggacgcccccccctcactcgcgcgttaggaggctcgggtcgttgtggtgcgctgtcttcccgcttgcgtcagggacctgcccgactcagtggccgccatggcatcagatgaaggcaaactttttgttggagggctgagttttgacaccaatgagcagtcgctggagcaggtcttctcaaagtacggacagatctctgaagtggtggttgtgaaagacagggagacccagagatctcggggatttgggtttgtcacctttgagaacattgacgacgctaaggatgccatgatggccatgaatgggaagtctgtagatggacggcagatccgagtagaccaggcaggcaagtcgtcagacaaccgatcccgtgggtaccgtggtggctctgccgggggccggggcttcttccgtgggggccgaggacggggccgtgggttctctagaggaggaggggaccgaggctatggggggaaccggttcgagtccaggagtgggggctacggaggctccagagactactatagcagccggagtcagagtggtggctacagtgaccggagctcgggcgggtcctacagagacagttatgacagttacgctacacacaacgagtaaaaacccttcctgctcaagatcgtccttccaatggctgtgtgtttaaagattgtgggagcttcgctgaacgttaatgtgtagtaaatgcacctccttgtattcccactttcgtagtcatttcggttctgatcttgtcaaacccagcctgaccgcttctgacgccgggatggcctcgttactagacttttctttttaaggaagtgctgtttttttttgagggttttcaaaacattttgaaaagcatttacttttttgaccacgagccatgagttttcaaaaaaatcgggggttgtgtgggtttttggtttttgttttagtttttggttgcgttgcctttttttttttagtggggttggccccatgaagtgggtgccccactcacttctctgagatcgaacggactgtgaatccgctctttgtcggaagctgagcaagctgtggcttttttccaactccgtgtgacgtttctgagtgtagtgtggtaggaccccggcgggtgtggcagcaactgccctggagccccagcccctgcgtccatctgtgctgtgcgccccacagtagacgtgcagacgtccctgagaggttcttgaagatgtttatttatattgtccttttttactggaagacgtacgcatactccatcgatgttgtatttgcagtggctgaggaattcttgtacgcagttttctttggctttacgaagccgattaaaagaccgtgtgaaatgaa

SEQ ID NO: 134 - DNA, 2528 bp, Homo sapiens
  ATP-binding cassette, sub-family B (MDR/TAP), member 7, mitochondrial transcript variant 1 (ABCB7), ABC transporter 7 protein, ATP-binding cassette transporter 7, ASAT; Atm1p; EST140535
  CDS (69)...(2330): ABCB7
aggtagccgaattcagtccgccagtgtcccataatcctcttctctcggttcctctttcctcgctcaagatggcgctgctcgcgatgcattcttggcgctgggcggccgcggcggctgctttcgaaaagcgccggcactccgcgattctgatccggcctttagtctctgttagcggctcaggtccgcagtggaggccacatcaactcggcgccttgggaaccgctcgagcctaccagcagattccagagtcattaaaaagtatcacatggcagagattgggaaaaggcaattcaggacagttcttagatgctgcaaaggctctccaggtatggccactgatagaaaagaggacatgttggcatggtcatgcaggaggaggactccacacagacccaaaagaagggttaaaagatgttgatactcggaaaatcataaaagcaatgctttcttatgtgtggcccaaagacaggccagatctacgagctagagttgccatttcgctgggatttttgggtggtgcaaaggccatgaatattgtggttcccttcatgtttaaatatgctgtagacagcctcaaccagatgtcgggaaacatgctgaacctgagtgatgcaccaaatacagttgcaaccatggcaacagcagttctgattggctatggtgtatcaagagctggagctgctttttttaacgaagttcgaaatgcagtatttggcaaggtagcccagaattcaatccgaagaatagccaaaaatgtctttctccatcttcacaacctggatctgggttttcacctgagcagacagacgggagctttatctaaggctattgacagaggaacaaggggtatcagttttgtcctgagtgctttggtatttaatcttcttcccatcatgtttgaagtgatgcttgtcagtggtgttttgtattacaaatgcggtgcccagtttgctttggtaacccttggaacacttggtacatacacagcattcacagttgcagtcacacggtggagaactagatttagaatagaaatgaacaaagcagataatgatgcaggtaatgctgctatagactcactgctgaattatgaaactgtgaagtattttaataatgaaagatatgaagcacagagatatgatggatttttgaagacgtatgagactgcttcattgaaaagtacctctactctggctatgctgaactttggtcaaagtgctattttcagtgtcggtttaacagctataatggtgctcgccagtcagggaattgtggcaggtacccttactgttggagatctagtaatggtgaatggactgctttttcagctttcattacccctgaactttctgggaactgtatatagagagactagacaagcactcatagatatgaacaccttgtttactctactcaaggtagacacccaaattaaagacaaagtgatggcatctccccttcagatcacaccacagacagctaccgtggcctttgataatgtgcattttgaatacattgagggccagaaagtccttagtggaatatcctttgaagtccctgcaggaaagaaagtggccattgtaggaggtagtgggtcagggaaaagcacaatagtgaggctattatttcgcttctatgagcctcaaaagggtagcatttatcttgctggtcaaaatatacaagatgtgagcctggaaagccttcggagggcagtgggagtggtacctcaggatgctgtcctcttccataatactatttattacaacctcttatatggaaacatcagtgcttcacctgaggaagtgtatgcagtggcaaaattagctggacttcatgatgcaattcttcgaatgccacatggatatgacacccaagtaggggaacgaggactcaagctttcaggaggagaaaagcaaagagtagcaattgcaagagccattttgaaggaccccccagtcatactctatgatgaagctacttcatcgttagattcgattactgaagagactattcttggtgccatgaaggatgtggtcaaacacagaacttctattttcattgcacacagattgtcaacagtggttgatgcagatgaaatcattgtcttggatcagggtaaggtagccgaacgtggtacccaccatggtttgcttgctaaccctcatagtatctattcagaaatgtggcatacacagagcagccgtgtgcagaaccatgataaccccaaatgggaagcaaagaaagaaaatatatccaaagaggaggaaagaaagaaactacaagaagaaattgtcaatagtgtgaaaggctgtggaaactgttcgtgctaagtcacataagacattttctttttttgttgttttggactacatatttgcactgaagcagaattgttttattaaaaaaatcatacattcccattttctataatccttcttttagataagatttatttaaaaggggatttgagttttacatctttcatagtctatttaatgtggcatctgtatttatccccaaattatttt

SEQ ID NO: 135 - DNA, 1136 bp, Homo sapiens
  alpha-N-acetyltransferase 1A, N-terminal acetyltransferase complex ARD1 subunit homolog A transcript variant 1 (ARD1A, ARD1), N-alpha-acetyltransferase 10, NatA catalytic subunit, ARD1P, DXS707, MCOPS1, NATD, TE2
  CDS (251)...(958): ARD1A
gaccggctccgcgcattggcccgccccgtgcgctggcctgtcccgcgcattggccaagcggccgggaggacgggcccggcggccgtgcacttccggccggtggccggcccggcgcgcaccgccccttccgccgtcgcccagcgagcccagctccggtcccagccccggccgtcccggcgtcgcttcggagcgcggcggcagctgactgcgccttcacgatccgctgggacccgcgagccccgccgccgttatgaacatccgcaatgcgaggccagaggacctaatgaacatgcagcactgcaacctcctctgcctgcccgagaactaccagatgaaatactacttctaccatggcctttcctggccccagctctcttacattgctgaggacgagaatgggaagattgtggggtatgtcctggccaaaatggaagaggacccagatgatgtgccccatggacatatcacctcattggctgtgaagcgttcccaccggcgcctcggtctggctcagaaactgatggaccaggcctctcgagccatgatagagaacttcaatgccaaatatgtctccctgcatgtcaggaagagtaaccgggccgccctgcacctctattccaacaccctcaactttcagatcagtgaagtggagcccaaatactatgcagatggggaggacgcctatgccatgaagcgggacctcactcagatggccgacgagctgaggcggcacctggagctgaaagagaagggcaggcacgtggtgctgggtgccatcgagaacaaggtggagagcaaaggcaattcacctccgagctcaggagaggcctgtcgcgaggagaagggcctggctgccgaggatagtggtggggacagcaaggacctcagcgaggtcagcgagaccacagagagcacagatgtcaaggacagctcagaggcctccgactcagcctcctagagcctgccccatcccctcctcaccccacgagctttcacaataaattcgctccgtggcactggggaactttgtgtgtgagcgcgcgcacatttagagggtgtgtttctccaggtcctctggtggggatgtgagccttggccttttgacccagagcatcctgaaaaaaaaaaaaaaaaaa

SEQ ID NO: 136 - DNA, 6587 bp, Homo sapiens
  envoplakin (EVPL, EVPK), 210 kDa paraneoplastic pemphigus antigen, 210 kDa cornified envelope precursor protein
  CDS (229)...(6330): EVPL
agtgtggccgttgtgggtgcatgcgcgtcaggcctgggacccggccgcccgcccgctgcctcacctgcaaggaggggcctcccagaaactcccttccccagtgcccagccgccccacctcgccagacttagctgaccagccagtgaggacgcccgctgcctcccacctgccctcctgccgtctttcgccagccaagcccagcctgagccagcacttgcctttacgaccatgttcaaggggctgagcaaaggctcccaggggaaggggtcccccaagggctcccccgccaaggggtcccccaaaggctcccccagcaggcacagccgggctgccacccaggagctggcccttctcatctcccgcatgcaagccaacgccgaccaggtggagcgggacatcctggagacgcagaagaggctgcagcaggaccggctgaacagtgagcagagccaggccctgcagcaccagcaggagacgggccgcagcctgaaggaggctgaggtgctgctcaaggacctcttcctggacgtggacaaggcccggcggctcaagcacccgcaggctgaggagattgagaaggacatcaagcagctgcacgagcgggtgacccaggagtgtgcggagtaccgtgccctgtacgagaagatggtgctgccccccgacgtgggacccagggtcgactgggcacgcgtgctggagcagaaacagaagcaggtctgcgcaggccagtacgggccgggcatggcggagctggagcaacagatcgccgagcacaacatcctgcagaaggagatcgacgcctatgggcagcagctgcggagcctcgtggggccggatgcagccaccatccggagccaataccgagacctactgaaggcggcgtcgtggcgcgggcagagcctgggcagcctgtacacgcacctccagggctgcacgcggcagctgagcgccctggctgagcagcagcgccgcatcctgcagcaggactggagcgacctcatggccgaccctgcgggcgtgcggcgggagtacgagcacttcaagcagcacgagctgctgagccaggagcagagcgtgaaccagctggaggacgacggcgagcgcatggtggagctgcggcaccccgcggtggggcccatccaggcccaccaggaggccctgaagatggagtggcagaacttcctgaacctgtgtatctgccaggagacccagctgcagcacgtggaggactaccgccggttccaggaagaggccgactcagtcagccagaccctggcgaagctcaactccaacttggatgccaagtacagccctgcacctgggggcccccctggcgcccccacagagctgctgcaacagctggaggcagaggaaaaacggctggccgtcaccgagagggccactggggacctgcagcggcgaagccgggatgtggcccctctgccacagcgaagaaacccccctcagcagcccctgcacgtggacagcatctgcgactgggactcaggagaagtgcagctgctgcagggtgagcggtataagctggtagataacactgacccgcacgcctgggtcgtgcagggccctggcggggagaccaagcgtgctcccgccgcctgcttctgcatcccagcaccagaccctgatgctgtggccagggcctcccggctggcctcagagctgcaggccctgaagcagaaattggccacagtccagagccgcctgaaggccagtgctgtggagtctcttcggcccagccagcaggctccatctggctcagacctggccaacccacaggcccagaagctcctgacacagatgacccggctggatggagacctgggacagatagagaggcaggtgctggcctgggcgcgggccccgctgagccgccccacacccttggaggacttggagggccgcatccacagccatgagggcacagcccagcgcctgcagagcctgggaacggagaaggagacagcccagaaggagtgcgaggcgtttctgtccacgcggcccgtgggccccgctgccctgcagctgcccgtagccctcaacagcgtgaagaacaagttcagtgacgtgcaggttctgtgcagcctctacggggagaaagccaaggctgccctggatctggagcggcagatccaggatgcggacagggtcatccgaggcttcgaggccaccctggtgcaggaggcccccatccctgctgaaccgggggctctgcaggagagggtcagcgagctgcagcgccagcggagggagctgctggaacagcagacctgcgtgctgcggctacaccgcgcgctgaaggcctcggagcacgcatgcgctgccctgcagaacaacttccaggagttctgccaagacctgcctcgccagcagcgccaggtgcgagccctcaccgaccgctaccacgccgtaggggaccagctggacctgcgggagaaggtggtgcaggatgccgccctcacctaccagcagttcaagaactgcaaggataacctgagctcctggctggagcacctgccccgcagccaggtgcggcccagcgacggccccagccagatcgcctacaagctgcaggcgcagaagaggctgacgcaggagatccagagccgagagcgggacagggccacagcatcccacctctcccaggccctgcaggcagcgctccaggactatgagctccaggcagacacctaccgctgctctttggagcccaccctggcagtgtcagcccccaagagaccccgagtggctcccctgcaagagagcatccaagcccaggagaagaaccttgcaaaggcctatactgaggttgcagcagcacagcagcagctgctccagcagctggagtttgctagaaaaatgctggagaagaaggagctcagtgaggacatccgaaggacccatgatgcaaagcagggctccgagagccctgcccaagcagggagagagtcagaggccctgaaggcccagctggaagaggagaggaagcgggtggcccgggtgcagcatgagctggaggcgcagaggagccaactgctgcagctgaggacccagcggcccttggagaggctggaggagaaggaagtggtagagttctaccgggacccccagctggagggcagcctgtccagggtgaaggcccaggtggaggaggagggcaagcggcgggctggcctgcaggcagacctggaagtggcagcccagaaggtcgtgcagctggaaagcaagaggaagaccatgcagcctcatctgctgaccaaggaggtcacccaggtggagagggaccccggcctggacagccaggcggcccagctcaggatccagatccagcagctccgcggggaggatgccgtcatctcggcccggctggaagggctgaagaaggagctactggcccttgagaagagggaggtggacgtgaaggagaaggtcgtggtgaaagaggtagtcaaggtggagaagaatctggaaatggtcaaggcagcccaggctctgaggctgcagatggaggaggatgctgcgcggaggaagcaggcggaggaggctgtggccaagctacaggctcgcatcgaagacctggagcgggctatcagctcggtggagcccaaggtcatcgtgaaggaggtgaagaaggtggagcaggacccagggctcctccaggagtcctccaggctgaggagcctcctcgaggaggagaggaccaagaacgcgacgctggccagggagctgagcgacctgcacagcaagtacagcgtggtggagaagcagaggcccaaagtgcagctccaggagcgcgtccacgagatcttccaggtggatccggagacagagcaggagatcactcggctcaaggccaagctgcaggagatggcgggcaagaggagcggtgtggagaaggaggtggagaagctgctgcccgacctggaggtcctgcgggcccagaagcccacggtggagtacaaggaggtgacccaggaggtggtgaggcatgagaggagccccgaggtgctgcgtgagatcgaccgcctgaaggctcagctcaacgagctcgtcaacagccacgggcgctcccaggagcagctcatccgcctgcagggtgagcgcgacgagtggaggcgcgagcgggccaaggtggagaccaagacggtgagcaaggaggtggtgcgccacgagaaggacccggtgctggagaaagaagcagagcggctccgccaggaggtgcgggaggcggcccagaagaggcgggccgcggaggacgcggtgtacgagctgcagagcaagcgcctgctgctggagaggaggaagcccgaggagaaggtggtggtgcaggaggtggtggtcacccagaaggacccgaagctgcgcgaggagcacagccggctgagcgggagcctggatgaggaggtgggccggcggcgccagctagagcttgaggtgcagcagctgcgggccggcgtggaggagcaggagggcctgctcagcttccaggaggaccgcagcaagaagctggccgtggagagggagctgcggcagctgaccttgaggatccaggagctcgagaagcggcctcccacggtgcaggagaagatcatcatggaggaagtggtcaagctggagaaggacccggacctggagaagtccacggaagccctgcggtgggacctggaccaggagaagacccaggtaaccgagctgaatcgggagtgcaagaacctgcaggtccagattgacgtcctccagaaagccaaatcgcaggagaagaccatctacaaggaagtgatccgggtgcagaaggaccgcgtcctggaagatgagcgggcccgcgtgtgggagatgctcaacagggagcgcacggcccggcaggcccgggaggaggaggcacggcgcctgcgggagcgcattgaccgggccgagacgctggggagaacctggtcccgggaggagtccgagctgcagagggcccgggaccaggccgaccaggagtgtgggcggctgcagcaggagctgcgggctctggagaggcagaagcagcagcagacactgcagctgcaggaggagtcgaagctgctcagccagaagacggagagcgagcgacagaaggcggcccagcggggccaggagctctcgcggctggaggcggccatcctccgcgagaaggaccagatctacgagaaggagcggacgctccgggacctccacgccaaggtgagccgggaggagctcagccaggagacccagacgcgagagaccaacctttccaccaagatctccatcctggaacccgagacggggaaggacatgtccccatacgaggcctacaagaggggcatcatcgacaggggccagtacttgcagctgcaggagctcgagtgtgactgggaggaggtcaccacctcggggccctgtggggaggagtctgtgctcctggaccgcaagagcgggaagcagtactccatcgaggccgccctccgctgccggcgcatctctaaggaggagtaccatctgtacaaggacggccacctgcccatctccgagtttgcgctgcttgtagctggggagaccaagccaagctcctcactctccatcggctctatcatctccaagtccccgctcgcctccccggccccccagagcaccagtttcttctctcccagcttctctctcgggctcggtgatgacagcttccctatcgccgggatctatgacacaaccacagacaacaagtgcagcatcaagacggccgtggccaagaacatgctggaccccatcactgggcagaagctactggaggcccaggcggccacagggggcatcgtggacctgctcagccgtgagcgctactctgtgcacaaggcgatggagaggggcctgatcgagaacacctccacacagaggctgcttaacgcccagaaggccttcaccggcatcgaggaccccgtcaccaagaagaggctctcggtgggcgaggccgtccagaagggctggatgccccgggagagcgtgctcccacacctgcaggtgcagcacctgaccggggggctcatcgaccccaagaggacaggccgcatccccatccagcaggccctcctctccgggatgatcagtgaagagctggcccagctcctgcaggacgagtccagctacgagaaggatttgacagaccccatctccaaggaacggctgagctacaaggaggccatgggccgctgccgcaaagaccccctgagcggcctgctgctcctgccagcggcactggaggggtaccgctgctaccgctccgcctcccccaccgtcccgcgctcccttcgctgacacgggccaaggagccagtggggaagtgcgtgtgttgggccaggtaggatacgtacacctcttgcctcagagcagcctcatcccaggcagtgggtcttccctctgtccaaccactgttttattattttactaacatggtgatgggctccctcccctaaccttggtgcctgatccatccccagaccaggacagcagccactcagttcttcctccacctccacccagtgatcccaataaacgaattctgtctccccgtg

SEQ ID NO: 137 - DNA, 11426 bp, Homo sapiens
  laminin alpha-5 chain (LAMA5), laminin-10 subunit alpha, laminin-11 subunit alpha, laminin-15 subunit alpha
  CDS (68)...(11155): LAMA5
agacccgccgggctcccgccgcgcgcgctgtccctggagctcggggacgcggcccggagccgggaagatggcgaagcggctctgcgcggggagcgcactgtgtgttcgcggcccccggggccccgcgccgctgctgctggtcgggctggcgctgctgggcgcggcgcgggcgcgggaggaggcgggcggcggcttcagcctgcacccgccctacttcaacctggccgagggcgcccgcatcgccgcctccgcgacctgcggagaggaggccccggcgcgcggctccccgcgccccaccgaggacctttactgcaagctggtagggggccccgtggccggcggcgaccccaaccagaccatccggggccagtactgtgacatctgcacggctgccaacagcaacaaggcacaccccgcgagcaatgccatcgatggcacggagcgctggtggcagagtccaccgctgtcccgcggcctggagtacaacgaggtcaacgtcaccctggacctgggccaggtcttccacgtggcctacgtcctcatcaagtttgccaactcaccccggccggacctctgggtgctggagcggtccatggacttcggccgcacctaccagccctggcagttctttgcctcctccaagagggactgtctggagcggttcgggccacagacgctggagcgcatcacacgggacgacgcggccatctgcaccaccgagtactcacgcatcgtgcccctggagaacggagagatcgtggtgtccctggtgaacggacgtccgggcgccatgaatttctcctactcgccgctgctacgtgagttcaccaaggccaccaacgtccgcctgcgcttcctgcgtaccaacacgctgctgggccatctcatggggaaggcgctgcgggaccccacggtcacccgccggtattattacagcatcaaggatatcagcatcggaggccgctgtgtctgccacggccacgcggatgcctgcgatgccaaagaccccacggacccgttcaggctgcagtgcacctgccagcacaacacctgcgggggcacctgcgaccgctgctgccccggcttcaatcagcagccgtggaagcctgcgactgccaacagtgccaacgagtgccagtcctgtaactgctacggccatgccaccgactgttactacgaccctgaggtggaccggcgccgcgccagccagagcctggatggcacctatcagggtgggggtgtctgtatcgactgccagcaccacaccaccggcgtcaactgtgagcgctgcctgcccggcttctaccgctctcccaaccaccctctcgactcgccccacgtctgccgccgctgcaactgcgagtccgacttcacggatggcacctgcgaggacctgacgggtcgatgctactgccggcccaacttctctggggagcggtgtgacgtgtgtgccgagggcttcacgggcttcccaagctgctacccgacgccctcgtcctccaatgacaccagggagcaggtgctgccagccggccagattgtgaattgtgactgcagcgcggcagggacccagggcaacgcctgccggaaggacccaagggtgggacgctgtctgtgcaaacccaacttccaaggcacccattgtgagctctgcgcgccagggttctacggccccggctgccagccctgccagtgttccagccctggagtggccgatgaccgctgtgaccctgacacaggccagtgcaggtgccgagtgggcttcgagggggccacatgtgatcgctgtgcccccggctactttcacttccctctctgccagttgtgtggctgcagccctgcaggaaccttgcccgagggctgcgatgaggccggccgctgcctatgccagcctgagtttgctggacctcattgtgaccggtgccgccctggctaccatggtttccccaactgccaagcatgcacctgcgaccctcggggagccctggaccagctctgtggggcgggaggtttgtgccgctgccgccccggctacacaggcactgcctgccaggaatgcagccccggctttcacggcttccccagctgtgtcccctgccactgctctgctgaaggctccctgcacgcagcctgtgacccccggagtgggcagtgcagctgccggccccgtgtgacggggctgcggtgtgacacatgtgtgcccggtgcctacaacttcccctactgcgaagctggctcttgccaccctgccggtctggccccagtggatcctgcccttcctgaggcacaggttccctgtatgtgccgggctcacgtggaggggccgagctgtgaccgctgcaaacctgggttctggggactgagccccagcaaccccgagggctgtacccgctgcagctgcgacctcaggggcacactgggtggagttgctgagtgccagccgggcaccggccagtgcttctgcaagccccacgtgtgcggccaggcctgcgcgtcctgcaaggatggcttctttggactggatcaggctgactattttggctgccgcagctgccggtgtgacattggcggtgcactgggccagagctgtgaaccgaggacgggcgtctgccggtgccgccccaacacccagggccccacctgcagcgagcctgcgagggaccactacctcccggacctgcaccacctgcgcctggagctggaggaggctgccacacctgagggtcacgccgtgcgctttggcttcaaccccctcgagttcgagaacttcagctggaggggctacgcgcagatggcacctgtccagcccaggatcgtggccaggctgaacctgacctcccctgaccttttctggctcgtcttccgatacgtcaaccggggggccatgagtgtgagcgggcgggtctctgtgcgagaggagggcaggtcggccacctgcgccaactgcacagcacagagtcagcccgtggccttcccacccagcacggagcctgccttcatcaccgtgccccagaggggcttcggagagccctttgtgctgaaccctggcacctgggccctgcgtgtggaggccgaaggggtgctcctggactacgtggttctgctgcctagcgcatactacgaggcggcgctcctgcagctgcgggtgactgaggcctgcacataccgtccctctgcccagcagtctggcgacaactgcctcctctacacacacctccccctggatggcttcccctcggccgccgggctggaggccctgtgtcgccaggacaacagcctgccccggccctgccccacggagcagctcagcccgtcgcacccgccactgatcacctgcacgggcagtgatgtggacgtccagcttcaagtggcagtgccacagccaggccgctatgccctagtggtggagtacgccaatgaggatgcccgccaggaggtgggcgtggccgtgcacaccccacagcgggccccccagcaggggctgctctccctgcacccctgcctgtacagcaccctgtgccggggcactgcccgggatacccaggaccacctggctgtcttccacctggactcggaggccagcgtgaggctcacagccgaacaggcacgcttcttcctgcacggggtcactctggtgcccattgaggagttcagcccggagttcgtggagccccgggtcagctgcatcagcagccacggcgcctttggccccaacagtgccgcctgtctgccctcgcgcttcccaaagccgccccagcccatcatcctcagggactgccaggtgatcccgctgccgcccggcctcccgctgacccacgcgcaggatctcactccagccatgtccccagctggaccccgacctcggccccccaccgctgtggaccctgatgcagagcccaccctgctgcgtgagccccaggccaccgtggtcttcaccacccatgtgcccacgctgggccgctatgccttcctgctgcacggctaccagccagcccaccccaccttccccgtggaagtcctcatcaacgccggccgcgtgtggcagggccacgccaacgccagcttctgtccacatggctacggctgccgcaccctggtggtgtgtgagggccaggccctgctggacgtgacccacagcgagctcactgtgaccgtgcgtgtgcccaagggccggtggctctggctggattatgtactcgtggtccctgagaacgtctacagctttggctacctccgggaggagcccctggataaatcctatgacttcatcagccactgcgcagcccagggctaccacatcagccccagcagctcatccctgttctgccgaaacgctgctgcttccctctccctcttctataacaacggagcccgtccatgtggctgccacgaagtaggtgctacaggccccacgtgtgagcccttcgggggccagtgtccctgccatgcccatgtcattggccgtgactgctcccgctgtgccaccggatactggggcttccccaactgcaggccctgtgactgcggtgcccgcctctgtgacgagctcacgggccagtgcatctgcccgccacgcaccatcccgcccgactgcctgctgtgccagccccagacctttggctgccaccccctggtcggctgtgaggagtgtaactgctcagggcccggcatccaggagctcacagaccctacctgtgacacagacagcggccagtgcaagtgcagacccaacgtgactgggcgccgctgtgatacctgctctccgggcttccatggctacccccgctgccgcccctgtgactgtcacgaggcgggcactgcgcctggcgtgtgtgaccccctcacagggcagtgctactgtaaggagaacgtgcagggccccaaatgtgaccagtgcagccttgggaccttctcactggatgctgccaaccccaaaggttgcacccgctgcttctgctttggggccacggagcgctgccggagctcgtcctacacccgccaggagttcgtggatatggagggatgggtgctgctgagcactgaccggcaggtggtgccccacgagcggcagccagggacggagatgctccgtgcagacctgcggcacgtgcctgaggctgtgcccgaggctttccccgagctgtactggcaggccccaccctcctacctgggggaccgggtgtcatcctacggtgggaccctccgttatgaactgcactcagagacccagcggggagatgtctttgtccccatggagagcaggccggatgtggtgctgcagggcaaccagatgagcatcacattcctggagccggcataccccacgcctggccacgttcaccgtgggcagctgcagctggtggaggggaacttccggcatacggagacgcgcaacactgtgtcccgcgaggagctcatgatggtgctggccagcctggagcagctgcagatccgtgccctcttctcacagatctcctcggctgtcttcctgcgcagggtggcactggaggtggccagcccagcaggccagggggccctggccagcaatgtggagctgtgcctgtgccccgccagctaccggggggactcatgccaggaatgtgcccccggcttctatcgggacgtcaaaggtctcttcctgggccgatgtgtcccttgtcagtgccatggacactcagaccgctgcctccctggctctggcgtctgtgtggactgccagcacaacaccgaaggggcccactgtgagcgctgccaggctggcttcgtgagcagcagggacgaccccagcgccccctgtgtcagctgcccctgccccctctcagtgccttccaacaacttcgccgagggctgtgtcctgcgaggcggccgcacccagtgcctctgcaaacctggttatgcaggtgcctcctgcgagcggtgtgcgcccggattctttgggaacccactggtgctgggcagctcctgccagccatgcgactgcagcggcaacggtgaccccaacttgctcttcagcgactgcgaccccctgacgggcgcctgccgtggctgcctgcgccacaccactgggccccgctgcgagatctgtgcccccggcttctacggcaacgccctgctgcccggcaactgcacccggtgcgactgtaccccatgtgggacagaggcctgcgacccccacagcgggcactgcctgtgcaaggcgggcgtgactgggcggcgctgtgaccgctgccaggagggacattttggtttcgatggctgcgggggctgccgcccgtgtgcttgtggaccggccgccgagggctccgagtgccacccccagagcggacagtgccactgccgaccagggaccatgggaccccagtgccgcgagtgtgcccctggctactgggggctccctgagcagggctgcaggcgctgccagtgccctgggggccgctgtgaccctcacacgggccgctgcaactgccccccggggctcagcggggagcgctgcgacacctgcagccagcagcatcaggtgcctgttccaggcgggcctgtgggccacagcatccactgtgaagtgtgtgaccactgtgtggtcctgctcctggatgacctggaacgggccggcgccctcctccccgccattcacgagcaactgcgtggcatcaatgccagctccatggcctgggcccgtctgcacaggctgaacgcctccatcgctgacctgcagagccagctccggagccccctgggcccccgccatgagacggcacagcagctggaggtgctggagcagcagagcacaagcctcgggcaggacgcacggcggctaggcggccaggccgtggggacccgagaccaggcgagccaattgctggccggcaccgaggccacactgggccatgcgaagacgctgttggcggccatccgggctgtggaccgcaccctgagcgagctcatgtcccagacgggccacctggggctggccaatgcctcggctccatcaggtgagcagctgctccggacactggccgaggtggagcggctgctctgggagatgcgggcccgggacctgggggccccgcaggcagcagctgaggctgagttggctgcagcacagagattgctggcccgggtgcaggagcagctgagcagcctctgggaggagaaccaggcactggccacacaaacccgcgaccggctggcccagcacgaggccggcctcatggacctgcgagaggctttgaaccgggcagtggacgccacacgggaggcccaggagctcaacagccgcaaccaggagcgcctggaggaagccctgcaaaggaagcaggagctgtcccgggacaatgccaccctgcaggccactctgcatgcggctagggacaccctggccagcgtcttcagattgctgcacagcctggaccaggctaaggaggagctggagcgcctcgccgccagcctggatggggctcggaccccactgctgcagaggatgcagaccttctccccggcgggcagcaagctgcgtctagtggaggccgccgaggcccacgcacagcagctgggccagctggcactcaatctgtccagcatcatcctggacgtcaaccaggaccgcctcacccagagggccatcgaggcctccaacgcctacagccgcatcctgcaggccgtgcaggctgccgaggatgctgctggccaggccctgcagcaggcggaccacacgtgggcgacggtggtgcggcagggcctggtggaccgagcccagcagctcctggccaacagcactgcactagaagaggccatgctccaggaacagcagaggctgggccttgtgtgggctgccctccagggtgccaggacccagctccgagatgtccgggccaagaaggaccagctggaggcgcacatccaggcggcgcaggccatgcttgccatggacacagacgagacaagcaagaagatcgcacatgccaaggctgtggctgctgaagcccaggacaccgccacccgtgtgcagtcccagctgcaggccatgcaggagaatgtggagcggtggcagggccagtacgagggcctgcggggccaggacctgggccaggcagtgcttgacgcaggccactcagtgtccaccctggagaagacgctgccccagctgctggccaagctgagcatcctggagaaccgtggggtgcacaacgccagcctggccctgtccgccagcattggccgcgtgcgagagctcattgcccaggcccggggggctgccagtaaggtcaaggtgcccatgaagttcaacgggcgctcaggggtgcagctgcgcaccccacgggatcttgccgaccttgctgcctacactgccctcaagttctacctgcagggcccagagcctgagcctgggcagggtaccgaggatcgctttgtgatgtacatgggcagccgccaggccactggggactacatgggtgtgtctctgcgtgacaagaaggtgcactgggtgtatcagctgggtgaggcgggccctgcagtcctaagcatcgatgaggacattggggagcagttcgcagctgtcagcctggacaggactctccagtttggccacatgtccgtcacagtggagagacagatgatccaggaaaccaagggtgacacggtggcccctggggcagaggggctgctcaacctgcggccagacgacttcgtcttctacgtcggggggtaccccagtaccttcacgccccctcccctgcttcgcttccccggctaccggggctgcatcgagatggacacgctgaatgaggaggtggtcagcctctacaacttcgagaggaccttccagctggacacggctgtggacaggccttgtgcccgctccaagtcgaccggggacccgtggctcacggacggctcctacctggacggcaccggcttcgcccgcatcagcttcgacagtcagatcagcaccaccaagcgcttcgagcaggagctgcggctcgtgtcctacagcggggtgctcttcttcctgaagcagcagagccagttcctgtgcttggccgtgcaagaaggcagcctcgtgctgttgtatgactttggggctggcctgaaaaaggccgtcccactgcagcccccaccgcccctgacctcggccagcaaggcgatccaggtgttcctgctggggggcagccgcaagcgtgtgctggtgcgtgtggagcgggccacggtgtacagcgtggagcaggacaatgatctggagctggccgacgcctactacctggggggcgtgccgcccgaccagctgcccccgagcctgcgacggctcttccccaccggaggctcagtccgtggctgcgtcaaaggcatcaaggccctgggcaagtatgtggacctcaagcggctgaacacgacaggcgtgagcgccggctgcaccgccgacctgctggtggggcgcgccatgactttccatggccacggcttccttcgcctggcgctctcgaacgtggcaccgctcactggcaacgtctactccggcttcggcttccacagcgcccaggacagtgccctgctctactaccgggcgtccccggatgggctatgccaggtgtccctgcagcagggccgtgtgagcctacagctcctgaggactgaagtgaaaactcaagcgggcttcgccgatggtgccccccattacgtcgccttctacagcaatgccacgggagtctggctgtatgtcgatgaccagctccagcagatgaagccccaccggggaccaccccccgagctccagccgcagcctgaggggcccccgaggctcctcctgggaggcctgcctgagtctggcaccatttacaacttcagtggctgcatcagcaacgtcttcgtgcagcggctcctgggcccacagcgcgtatttgatctgcagcagaacctgggcagcgtcaatgtgagcacgggctgtgcacccgccctgcaagcccagaccccgggcctggggcctagaggactgcaggccaccgcccggaaggcctcccgccgcagccgtcagcccgcccggcatcctgcctgcatgctgcccccacacctcaggaccacccgagactcctaccagtttgggggttccctgtccagtcacctggagtttgtgggcatcctggcccgacataggaactggcccagtctctccatgcacgtcctcccgcgaagctcccgaggcctcctcctcttcactgcccgtctgaggcccggcagcccctccctggcgctcttcctgagcaatggccacttcgttgcacagatggaaggcctcgggactcggctccgcgcccagagccgccagcgctcccggcctggccgctggcacaaggtctccgtgcgctgggagaagaaccggatcctgctggtgacggacggggcccgggcctggagccaggaggggccgcaccggcagcaccagggggcagagcacccccagccccacaccctctttgtgggcggcctcccggccagcagccacagctccaaacttccggtgaccgtcgggttcagcggctgtgtgaagagactgaggctgcacgggaggcccctgggggcccccacacggatggcaggggtcacaccctgcatcttgggccccctggaggcgggcctgttcttcccaggcagcgggggagttatcactttagacctcccaggagctacactgcctgatgtgggcctggaactggaggtgcggcccctggcagtcaccggactgatcttccacttgggccaggcccggacgcccccctacttgcagttgcaggtgaccgagaagcaagtcctgctgcgggcggatgacggagcaggggagttctccacgtcagtgacccgcccctcagtgctgtgtgatggccagtggcaccggctagcggtgatgaaaagcgggaatgtgctccggctggaggtggacgcgcagagcaaccacaccgtgggccccttgctggcggctgcagctggtgccccagcccctctgtacctcgggggcctgcctgagcccatggccgtgcagccctggccccccgcctactgcggctgcatgaggaggctggcggtgaaccggtcccccgtcgccatgactcgctctgtggaggtccacggggcagtgggggccagtggctgcccagccgcctaggacacagccaaccccggcccctggtcaggcccctgcagctgcctcacaccgccccttgtgctcgcctcataggtgtctatttggactctaagctctacgggtgacagatcttgtttctgaagatggtttaagttatagcttcttaaacgaaagaataaaatactgcaaaatgtttttatatttggcccttccacccatttttaattgtgagagatttgtcaccaatcatcactggttcctccttaaaaattaaaaagtaacttctgtgtaa

SEQ ID NO: 138 - DNA, 6930 bp, Homo sapiens
  myosin, heavy chain 14, non-muscle transcript variant 3 (MYH14), nonmuscle myosin heavy chain II-C (NMHC II-C, NMHC-II-C), myosin-14, MYH14 variant protein, DFNA4, DFNA4A, FP17425, MHC16, MYH17, PNMHH
  CDS (48)...(6158): MYH14
ctctttctccccaggccgaagcctcgggacggccctggaagccgaccatggcagccgtgaccatgtcggtgcccgggcggaaggcgccccccaggccgggcccagtgcccgaggcggcccagccgttcctgttcacgccccgcgggcccagcgcgggtggcgggcctggctcgggcacctccccgcaggtggagtggacggcccggcgtctcgtgtgggtgccttcggagcttcacgggttcgaggcggcggcgctgcgggacgaaggcgaggaggaggcggaggtggagctggcggagagcgggaggcggctgcgactgccgcgggaccagatccagcgcatgaacccgcccaagttcagcaaggccgaggacatggccgagctgacctgcctcaacgaggcctcggtcctgcacaacctccgggagcggtactactccggcctcatctacacgtactccggccttttctgtgtggtcatcaacccgtacaagcagcttcccatctacacagaagccattgtggagatgtaccggggcaagaagcgccacgaggtgccaccccacgtgtacgcagtgaccgagggggcctatcggagcatgctgcaggatcgtgaggaccagtccattctctgcactggagagtctggagctgggaagacggaaaacaccaagaaggtcatccagtacctcgcccacgtggcgtcgtctccaaagggcaggaaggagccgggtgtccccgcctccgtcagcaccgtgtcttatggtgagctggagcggcagctgcttcaggccaaccccatcctagaggcctttggcaatgccaagacagtgaagaatgacaactcctcccgattcggcaaattcatccgcatcaactttgatgttgccgggtacatcgtgggcgccaacattgagacctacctgctggagaagtcgcgggccatccgccaggccaaggacgagtgcagcttccacatcttctaccagctgctggggggcgctggagagcagctcaaagccgacctcctcctcgagccctgctcccactaccggttcctgaccaacgggccgtcatcctctcccggccaggagcgggaactcttccaggagacgctggagtcgctgcgggtcctgggattcagccacgaggaaatcatctccatgctgcggatggtctcagcagttctccagtttggcaacattgccttgaagagagaacggaacaccgatcaagccaccatgcctgacaacacagctgcacagaagctctgccgcctcttgggactgggggtgacggatttctcccgagccttgctcacccctcgcatcaaagttggccgagactatgtgcagaaagcccagactaaggaacaggctgacttcgcgctggaggccctggccaaggccacctacgagcgcctcttccgctggctggttctgcgcctcaaccgggccttggaccgcagcccccgccaaggcgcctccttcctgggcatcctggacatcgcgggctttgagatcttccagctgaactccttcgagcagctctgcatcaactacaccaacgagaagctgcagcagctcttcaaccacaccatgttcgtgctggagcaggaggagtaccagcgtgagggcatcccctggaccttcctcgactttggcctcgacctgcagccctgcatcgacctcatcgagcggccggccaacccccctggactcctggccctgctggatgaggagtgctggttcccgaaggccacagacaagtcgtttgtggagaaggtagcccaggagcagggcggccaccccaagttccagcggccgaggcacctgcgggatcaggccgacttcagtgttctccactacgcgggcaaggtcgactacaaggccaacgagtggctgatgaaaaacatggaccctctgaatgacaacgtcgcagccttgctccaccagagcacagaccggctgacggcagagatctggaaagacgaacatgggggcttccagcagttctctttccttggctccttcccaccgtcgcccccaggatctgcagagaggtgcagctctgctatttctccgccaggggtggagggcatcgtggggctggaacaggtgagcagcctgggcgacggcccaccaggtggccgcccccgtcggggtatgttccggacagtgggacagctctacaaggagtccctgagccgcctcatggccacactcagcaacaccaaccccagttttgtccgctgcattgtccccaaccacgagaagagggccgggaagctggagccacggctggtgctggaccagcttcgctgcaacggggtcctggagggcatccgcatctgtcgccagggcttccccaaccgcatcctcttccaggagttccggcagcgatacgagatcctgacacccaatgccatccccaagggcttcatggatgggaagcaggcctgtgaaaagatgatccaggcgctggaactggaccccaacctctaccgcgtgggacagagcaagatcttcttccgggctggggtcctggcccagctggaagaggagcgagacctgaaggtcaccgacatcatcgtctccttccaggcagctgcccggggatacctggctcgcagggccttccagaagcgccagcagcagcagagcgccctgagggtgatgcagcggaactgcgcggcctacctcaagctgagacactggcagtggtggcggctgtttaccaaggtgaagccactgctgcaggtgacgcggcaggatgaggtgctgcaggcacgggcccaggagctgcagaaagtgcaggagctacagcagcagagcgcccgcgaagttggggagctccagggccgagtggcacagctggaagaggagcgcgcccgcctggcagagcaattgcgagcagaggcagaactgtgtgcagaggccgaggagacgcgggggaggctggcagcccgcaagcaggagctggagctggtggtgtcagagctggaggctcgcgtgggcgaggaggaggagtgcagccgtcaaatgcaaaccgagaagaagaggctgcagcagcacatacaggagctagaggcccaccttgaggctgaggagggtgcgcggcagaagctgcagctggagaaggtgacgacagaggcaaaaatgaagaaatttgaagaggacctgctgctcctggaagaccagaattccaagctgagcaaggagcggaagctgctggaagatcgtctggccgagttctcatcccaggcagctgaggaggaggagaaggtcaagagcctcaataagctacggctcaaatatgaggccacaatcgcagacatggaggaccgcctacggaaggaggagaagggtcgccaggagctggagaagctgaagcggaggctggatggggagagctcagagctgcaggagcagatggtggagcagcaacagcgggcagaggagctgcgggcccagctgggccggaaggaggaggagctgcaggctgccctggccagggcagaagacgagggtggggcccgggcccagctgctgaaatccctgcgggaggctcaagcagccctggccgaggcccaggaggacctggagtctgagcgtgtggccaggaccaaggcggagaagcagcgccgggacctgggcgaggagctggaggcgctgcggggcgagctggaggacacgctggactccaccaacgcacagcaggagctccggtccaagagggaacaggaggtgacggagctgaagaagactctggaggaggagactcgcatccacgaggcggcagtgcaggagctgaggcagcgccacggccaggccctgggggagctggcggagcagctggagcaggcccggaggggcaaaggtgcatgggagaagacccggctggccctggaggccgaggtgtccgagctgcgggcagaactgagcagcctgcagactgcacgtcaggagggtgagcagcggaggcgccgcctggagttacagctgcaggaggtgcagggccgggctggtgatggggagagggcacgagcggaggctgctgagaagctgcagcgagcccaggctgaactggagaatgtgtctggggcgctgaacgaggctgagtccaaaaccatccgtcttagcaaggagctgagcagcacagaagcccagctgcacgatgcccaggagctgctgcaggaggagaccagggcgaaattggccttggggtcccgggtgcgagccatggaggctgaggcagccgggctgcgtgagcagctggaggaggaggcagctgccagggaacgggcgggccgtgaactgcagactgcccaggcccagctttccgagtggcggcggcgccaggaggaggaggcaggggcactggaggcaggggaggaggcacggcgccgggcagcccgggaggccgaggccctgacccagcgcctggcagaaaagacagagaccgtggatcggctggagcggggccgccgccggctgcagcaggagctggacgacgccaccatggacctggagcagcagcggcagcttgtgagcaccctggagaagaagcagcgcaagtttgaccagcttctggcagaggagaaggcagctgtacttcgggcagtggaggaacgtgagcgggccgaggcagagggccgggagcgtgaggctcgggccctgtcactgacacgggcactggaggaggagcaggaggcacgtgaggagctggagcggcagaaccgggccctgcgggctgagctggaggcactgctgagcagcaaggatgacgtcggcaagagcgtgcatgagctggaacgagcctgccgggtagcagaacaggcagccaatgatctgcgagcacaggtgacagaactggaggatgagctgacagcggccgaggatgccaagctgcgtctggaggtgactgtgcaggctctcaagactcagcatgagcgtgacctgcagggccgtgatgaggctggtgaagagaggcggaggcagctggccaagcagctgagagatgcagaggtggagcgggatgaggagcggaagcagcgcactctggccgtggctgcccgcaagaagctggagggagagctggaggagctgaaggctcagatggcctctgccggccagggcaaggaggaggcggtgaagcagcttcgcaagatgcaggcccagatgaaggagctatggcgggaggtggaggagacacgcacctcccgggaggagatcttctcccagaatcgggaaagtgaaaagcgcctcaagggcctggaggctgaggtgctgcggctgcaggaggaactggccgcctcggaccgtgctcggcggcaggcccagcaggaccgggatgagatggcagatgaggtggccaatggtaaccttagcaaggcagccattctggaggagaagcgtcagctggaggggcgcctggggcagttggaggaagagctggaggaggagcagagcaactcggagctgctcaatgaccgctaccgcaagctgctcctgcaggtagagtcactgaccacagagctgtcagctgagcgcagtttctcagccaaggcagagagcgggcggcagcagctggaacggcagatccaggagctacggggacgcctgggtgaggaggatgctggggcccgtgcccgccacaagatgaccattgctgcccttgagtctaagttggcccaggctgaggagcagctagagcaagagaccagagagcgcatcctctctggaaagctggtgcgcagagctgagaagcggcttaaagaggtggtgctccaggtggaggaggagcggagggtggctgaccagctccgggaccagctggagaagggaaaccttcgagtcaagcagctgaagcggcagctggaggaggccgaggaggaggcatcccgggctcaggccggccgccggaggctgcagcgtgagctggaagatgtcacagagtcggccgagtccatgaaccgtgaagtgaccacactgaggaaccggcttcgacgcggccccctcaccttcaccacccgcacggtgcgccaggtcttccgactagaggagggcgtggcatccgacgaggaggcagaggaagcacagcctgggtctgggccatccccggagcctgaggggtccccaccagcccacccccagtgaccctaccctgtccccagatgcactaacagatggggcccagcccccttcctccctggaccccacgggcccctgtcccaggaaccccgccctctgacttcttgccctttggaaatggtgcagcactctggcatttatcacccccacctgggtcccctgcaacctcccatcaaaggatgacccctaaacacagaggagcggggcaggcagggaggcaatgactggagctaccttgcttgttgggggactgggtacagttggcaagctgtgtttccatcagctccctgtcctcctttcttccctcgttattgatctatagacattaggaagggagtgagacggctcctccaccatcctcagccagtgcaacccattccctctgcttctctctctctctctctctctccctccctctccttccctaccctctcaccatctttcttggcctctctgagggtctctctgtgcatctttttaggaatctcgctctcactctctacgtagccactctccttcccccatttctgcgtccacccctgaactcctgagcgacagaagccccaggcctccaccagccttgaacccttgcaaaggggcaggacaaggggacccctctcactcctgctgctgcccatgctctgccctcccttctggttgctctgagggttcggagcttccctctgggactaaaggagtgtcctttaccctcccagcctccaggctctggcagaaataaactccaacccgactggaccataaaaaaaaaaaaaaaaaa

SEQ ID NO: 139 - DNA, 1531 bp, Homo sapiens
  Rab geranylgeranyltransferase, beta subunit (RABGGTB, GGTB), geranylgeranyl transferase type-2 subunit beta, type II protein geranyl-geranyltransferase subunit beta, GGTase-II-beta; rab GGTase beta; rab GG transferase beta
  CDS (79)...(1074): RABGGTB
gagaggcgcatctgcgcaggcgcccggctcctaagtctacccaggaactgaccctgctctctcctttccctgttagacatgggcactccacagaaggatgttattatcaagtcagatgcaccggacactttgttattggagaaacatgcagattatatcgcatcctatggctcaaagaaagatgattatgaatactgtatgtctgagtatttgagaatgagtggcatctattggggtctgacagtaatggatctcatgggacaacttcatcgcatgaatagagaagagattctggcatttattaagtcttgccaacatgaatgtggtggaataagtgctagtatcggacatgatcctcatcttttatacactcttagtgctgtccagattcttacgctgtatgacagtattaatgttattgacgtaaataaagttgtggaatatgttaaaggtctacagaaagaagatggttcttttgctggagatatttggggagaaattgacacaagattctctttttgtgcggtggcaactttggctttgttggggaagcttgatgctattaatgtggaaaaggcaatcgaatttgttttatcctgtatgaactttgacggtggatttggttgcagaccaggttctgaatcccatgctgggcagatctattgttgcacaggatttctggcaattacaagtcagttgcatcaagtaaattctgatttacttggctggtggctttgtgaacgacaattaccctcaggcgggctcaatggaaggccggagaagttaccagatgtatgctactcatggtgggtcctggcttccctaaagataattggaagacttcattggattgatagagagaaactgcgtaatttcattttagcatgtcaagatgaagaaacggggggatttgcagacaggccaggagatatggtggatccttttcataccttatttggaattgctggattgtcacttttgggagaagaacagattaaacctgttaatcctgtcttttgcatgcctgaagaagtgcttcagagagtgaatgttcagcctgagctagtgagctagattcattgaattgaaagttgcatagtatagttttgccattttaacatttctgtatttgaagtgcttatcgaatctaaaagtgactactgttaatattttgtatattgtgttaaattaattttaataaattatataattatacatattgtaaaataaagaccggtattttattttctgctttttattctgaagtcctgttattctgactacagttctttgtgtatacttctgtgtctgttatgttcaataactgagctaacataaaataactctaggtttctacttgatttttcccccatgtatacctttcatctgttctatagcaagttgatgtaaattggtttgtcaacaagaatgttaactgatgaaagtggatagaacccatacatgaattaaatgatgcacaaaataaatggctgttgaaatttggaaatgattgaaaaaaaaaaaaaaaaaa

SEQ ID NO: 140 - DNA, 514 bp, Homo sapiens
  60S ribosomal protein L27, L27
  CDS (46)...(456): RPL27
tccttctttcctttttgctggtagggccgggtggttgctgccgaaatgggcaagttcatgaaacctgggaaggtggtgcttgtcctggctggacgctactccggacgcaaagctgtcatcgtgaagaacattgatgatggcacctcagatcgcccctacagccatgctctggtggctggaattgaccgctacccccgcaaagtgacagctgccatgggcaagaagaagatcgccaagagatcaaagataaaatcttttgtgaaagtgtataactacaatcacctaatgcccacaaggtactctgtggatatccccttggacaaaactgtcgtcaataaggatgtcttcagagatcctgctcttaaacgcaaggcccgacgggaggccaaggtcaagtttgaagagagatacaagacaggcaagaacaagtggttcttccagaaactgcggttttagatgctttgttttgatcattaaaaattataaagaaaaaaaaaaaaaaaaaaaaaaaaaa

SEQ ID NO: 141 - DNA, 531 bp, Homo sapiens
  40S ribosomal protein S15, S15, homolog of rat insulinoma (RIG), insulinoma protein
  CDS (63)...(500): RPS15
ggcagtctcgcgataactgcgcaggcgcggaccaaagcgatctcttctgaggatccggcaagatggcagaagtagagcagaagaagaagcggaccttccgcaagttcacctaccgcggcgtggacctcgaccagctgctggacatgtcctacgagcagctgatgcagctgtacagtgcgcgccagcggcggcggctgaaccggggcctgcggcggaagcagcactccctgctgaagcgcctgcgcaaggccaagaaggaggcgccgcccatggagaagccggaagtggtgaagacgcacctgcgggacatgatcatcctacccgagatggtgggcagcatggtgggcgtctacaacggcaagaccttcaaccaggtggagatcaagcccgagatgatcggccactacctgggcgagttctccatcacctacaagcccgtaaagcatggccggcccggcatcggggccacccactcctcccgcttcatccctctcaagtaatggctcagctaataaaggcgcacatgactcc

SEQ ID NO: 142 - DNA, 1712 bp, Homo sapiens
  inosine-5'-monophosphate dehydrogenase 2, inosine monophosphate dehydrogenase type II, IMP (inosine monophosphate) dehydrogenase 2, IMP (inosine monophosphate) dehydrogenase 2, IMP oxireductase 2 (IMPDH2, IMPD2, IMPDH-II, IMPD 2; IMPDH 2)
  CDS (93)...(1637): IMPDH2
cgaaatcggctggtttatattggcgcggcccagacggcagaggtctctgcggcgcggtcctcggagacacgcggcggtgtcctgtgttggccatggccgactacctgattagtgggggcacgtcctacgtgccagacgacggactcacagcacagcagctcttcaactgcggagacggcctcacctacaatgactttctcattctccctgggtacatcgacttcactgcagaccaggtggacctgacttctgctctgaccaagaaaatcactcttaagaccccactggtttcctctcccatggacacagtcacagaggctgggatggccatagcaatggcgcttacaggcggtattggcttcatccaccacaactgtacacctgaattccaggccaatgaagttcggaaagtgaagaaatatgaacagggattcatcacagaccctgtggtcctcagccccaaggatcgcgtgcgggatgtttttgaggccaaggcccggcatggtttctgcggtatcccaatcacagacacaggccggatggggagccgcttggtgggcatcatctcctccagggacattgattttctcaaagaggaggaacatgactgtttcttggaagagataatgacaaagagggaagacttggtggtagcccctgcaggcatcacactgaaggaggcaaatgaaattctgcagcgcagcaagaagggaaagttgcccattgtaaatgaagatgatgagcttgtggccatcattgcccggacagacctgaagaagaatcgggactacccactagcctccaaagatgccaagaaacagctgctgtgtggggcagccattggcactcatgaggatgacaagtataggctggacttgctcgcccaggctggtgtggatgtagtggttttggactcttcccagggaaattccatcttccagatcaatatgatcaagtacatcaaagacaaataccctaatctccaagtcattggaggcaatgtggtcactgctgcccaggccaagaacctcattgatgcaggtgtggatgccctgcgggtgggcatgggaagtggctccatctgcattacgcaggaagtgctggcctgtgggcggccccaagcaacagcagtgtacaaggtgtcagagtatgcacggcgctttggtgttccggtcattgctgatggaggaatccaaaatgtgggtcatattgcgaaagccttggcccttggggcctccacagtcatgatgggctctctcctggctgccaccactgaggcccctggtgaatacttcttttccgatgggatccggctaaagaaatatcgcggtatgggttctctcgatgccatggacaagcacctcagcagccagaacagatatttcagtgaagctgacaaaatcaaagtggcccagggagtgtctggtgctgtgcaggacaaagggtcaatccacaaatttgtcccttacctgattgctggcatccaacactcatgccaggacattggtgccaagagcttgacccaagtccgagccatgatgtactctggggagcttaagtttgagaagagaacgtcctcagcccaggtggaaggtggcgtccatagcctccattcgtatgagaagcggcttttctgaaaagggatccagcacacctcctcggtttttttttcaataaaagtttagaaagaaaaaaaaaaaaaaaaaaaaaaa

SEQ ID NO: 143 - DNA, 1655 bp, Homo sapiens
  sigma non-opioid intracellular receptor 1 transcript variant 1, sigma 1-type opioid receptor (SIGMAR1, hSigmaR1, SIG-1R, sigma1R), SR31747 binding protein 1 (SR-BP1, SR-BP, SRBP), aging-associated gene 8 protein, ALS16
  CDS (75)...(746): SIGMAR1
ctccgaggccgtgagcgcaaagcctcaggccccggctccctcctgagctgcgccgtgccaggccgcccgccgggatgcagtgggccgtgggccggcggtgggcgtgggccgcgctgctcctggctgtcgcagcggtgctgacccaggtcgtctggctctggctgggtacgcagagcttcgtcttccagcgcgaagagatagcgcagttggcgcggcagtacgctgggctggaccacgagctggccttctctcgtctgatcgtggagctgcggcggctgcacccaggccacgtgctgcccgacgaggagctgcagtgggtgttcgtgaatgcgggtggctggatgggcgccatgtgccttctgcacgcctcgctgtccgagtatgtgctgctcttcggcaccgccttgggctcccgcggccactcggggcgctactgggctgagatctcggataccatcatctctggcaccttccaccagtggagagagggcaccaccaaaagtgaggtcttctacccaggggagacggtagtacacgggcctggtgaggcaacagctgtggagtgggggccaaacacatggatggtggagtacggccggggcgtcatcccatccaccctggccttcgcgctggccgacactgtcttcagcacccaggacttcctcaccctcttctatactcttcgctcctatgctcggggcctccggcttgagctcaccacctacctctttggccaggacccttgaccagccaggcctgaaggaagacctgcggatggacaggagcgggcaggcccgcacatatccacttgctggagcccatgtttacagacagggacatacaccatgcagatcctgagttcctgctgtatgagcagggatatccatgcttatgtatccaaacacagagacccatgggaacaaatgagacacatatagatactgagacctgtgtgtacagtaggaccatgcactcacacccatctggagagggagcccccggtataccaagggagccagttgtgttcagacacacacatcacagcttgactcactaactgaggcctttccatagctccacagcttcccacctcctccccaccaaaccggggttctagagttaaggatgggggagggtattatactgcctcagtctgactcctcaacccagcagcaatttgaggggatgagggggaagaggagctgccttttggaggcccccttcacctgcagctatgatgcccttccccttctcccctgtcctcaccatatgccttatccccattctactcccctgctatgcaagtgcccctgtggcttgtccccaaccccctcagcaacaaagctcagctggggaacgagagtaatttgaagaatgcttgaagtcagcgtcttccattccagaaagacccccattcttcctttgggggtatgatgtggaagctggtttcagcccaggacccaccactgaggagaggatctagacaggtgggcctaattccaaggggcccttcctggcctggagaaggccttttacacacacacaacacatacacacacacacacacacacacatatcacagttttcacacagcccctgctgcattctctgtccatctgtctgtttctattaataaagatttgttgatctgttcc

SEQ ID NO: 144 - DNA, 898 bp, Homo sapiens
  ATP synthase, H+ transporting, mitochondrial F0 complex, subunit C2 (subunit 9) transcript variant 2, ATP synthase F(0) complex subunit C2, mitochondrial precursor (ATP5G2, ATP5A), ATP synthase lipid-binding protein, mitochondrial, ATP synthase proteolipid P2
  CDS (134)...(730): ATP5G2
ccacgttacggatcggcttactccgcggagttggcctcatttctgcagtcggcgctccctgtagtttctcctctcgaacgccaggtggagcaaccggccggataccgccacagccctggcaggcggcgctgtgatgcctgagctgatcctgtatgttgcaatcactctatccgtggctgagcgactcgttggcccgggtcacgcatgcgctgagccttcctttcgctcttcccgctgctccgcccctctctgtcttctctgcagtgggagcagctctcctgccacagctcctcaccccctgaaaatgttcgcctgctccaagtttgtctccactccctccttggtcaagagcacctcacagctgctgagccgtccgctatctgcagtggtgctgaaacgaccggagatactgacagatgagagcctcagcagcttggcagtctcatgtccccttacctcacttgtctctagccgcagcttccaaaccagcgccatttcaagggacatcgacacagcagccaagttcattggagctggggctgccacagttggggtggctggttctggggctgggattggaactgtgtttgggagcctcatcattggttatgccaggaacccttctctgaagcaacagctcttctcctacgccattctgggctttgccctctcggaggccatggggctcttttgtctgatggtagcctttctcatcctctttgccatgtgaaggagccgtctccacctcccatagttctcccgcgtctggttggccccgtgtgttccttttcctatacctccccaggcagcctggggaacgtggttggctcagggtttgacagagaaaagacaaataaatactgtattaataagatgtttcttgaaaaaaaaaaaaaaa

SEQ ID NO: 145 - RNA, 15 nt, Artificial Sequence
  synthetic 5' untranslated region (5'UTR) consensus sequence pyrimidine rich translational element (PRTE)
cuuccuuucccugcu

SEQ ID NO: 146 - DNA, 26 bp, Artificial Sequence
  synthetic YB1 5'UTR cloning oligonucleotide deletion (20-34) forward
gctacaagcttgggcttatcccgcct

SEQ ID NO: 147 - DNA, 26 bp, Artificial Sequence
  synthetic YB1 5'UTR cloning  oligonucleotide deletion (20-34) reverse
tcgatccatggggttgcggtgatggt

SEQ ID NO: 148 - DNA, 40 bp, Artificial Sequence
  synthetic site-directed mutagenesis oligonucleotide deletion (20-34) forward
tgggcttatcccgcctgtccttcgatcggtagcgggagcg

SEQ ID NO: 149 - DNA, 40 bp, Artificial Sequence
  synthetic site-directed mutagenesis oligonucleotide deletion (20-34) reverse
cgctcccgctaccgatcgaaggacaggcgggataagccca

SEQ ID NO: 150 - DNA, 55 bp, Artificial Sequence
  synthetic site-directed mutagenesis oligonucleotide transversion (20-34) forward
tgggcttatcccgcctgtccgcggtaagagcgatcttcgatcggtagcgggagcg

SEQ ID NO: 151 - DNA, 55 bp, Artificial Sequence
  synthetic site-directed mutagenesis oligonucleotide transversion (20-34) reverse
cgctcccgctaccgatcgaagatcgctcttaccgcggacaggcgggataagccca

SEQ ID NO: 152 - DNA, 20 bp, Artificial Sequence
  synthetic human qPCR oligonucleotide beta-actin forward
gcaaagacctgtacgccaac

SEQ ID NO: 153 - DNA, 20 bp, Artificial Sequence
  synthetic human qPCR oligonucleotide beta-actin reverse
agtacttgcgctcaggagga

SEQ ID NO: 154 - DNA, 20 bp, Artificial Sequence
  synthetic human qPCR oligonucleotide CD44 forward
caacaacacaaatggctggt

SEQ ID NO: 155 - DNA, 24 bp, Artificial Sequence
  synthetic human qPCR oligonucleotide CD44 reverse
ctgaggtgtctgtctctttcatct

SEQ ID NO: 156 - DNA, 20 bp, Artificial Sequence
  synthetic human qPCR oligonucleotide vimentin forward
ggcccagctgtaagttggta

SEQ ID NO: 157 - DNA, 18 bp, Artificial Sequence
  synthetic human qPCR oligonucleotide vimentin reverse
ggagcgagagtggcagag

SEQ ID NO: 158 - DNA, 19 bp, Artificial Sequence
  synthetic human qPCR oligonucleotide Snail1 forward
cactatgccgcgctctttc

SEQ ID NO: 159 - DNA, 25 bp, Artificial Sequence
  synthetic human qPCR oligonucleotide Snail1 reverse
gctggaaggtaaactctggattaga

SEQ ID NO: 160 - DNA, 21 bp, Artificial Sequence
  synthetic human qPCR oligonucleotide YB1 forward
tcgccaaagacagcctagaga

SEQ ID NO: 161 - DNA, 22 bp, Artificial Sequence
  synthetic human qPCR oligonucleotide YB1 reverse
tctgcgtcggtaattgaagttg

SEQ ID NO: 162 - DNA, 21 bp, Artificial Sequence
  synthetic human qPCR oligonucleotide MTA1 forward
caaagtggtgtgcttctaccg

SEQ ID NO: 163 - DNA, 21 bp, Artificial Sequence
  synthetic human qPCR oligonucleotide MTA1 reverse
cggccttatagcagactgaca

SEQ ID NO: 164 - DNA, 20 bp, Artificial Sequence
  synthetic human qPCR oligonucleotide PLAU forward
ttgctcaccacaacgacatt

SEQ ID NO: 165 - DNA, 20 bp, Artificial Sequence
  synthetic human qPCR oligonucleotide PLAU reverse
ggcaggcagatggtctgtat

SEQ ID NO: 166 - DNA, 19 bp, Artificial Sequence
  synthetic human qPCR oligonucleotide FGFBP1 forward
actggatccgtgtgctcag

SEQ ID NO: 167 - DNA, 20 bp, Artificial Sequence
  synthetic human qPCR oligonucleotide FGFBP1 reverse
gagcagggtgaggctacaga

SEQ ID NO: 168 - DNA, 23 bp, Artificial Sequence
  synthetic human qPCR oligonucleotide ARID5B forward
tggactcaacttcaaagacgttc

SEQ ID NO: 169 - DNA, 20 bp, Artificial Sequence
  synthetic human qPCR oligonucleotide ARID5B reverse
acgttcgtttcttcctcgtc

SEQ ID NO: 170 - DNA, 20 bp, Artificial Sequence
  synthetic human qPCR oligonucleotide CTGF forward
ctcctgcaggctagagaagc

SEQ ID NO: 171 - DNA, 21 bp, Artificial Sequence
  synthetic human qPCR oligonucleotide CTGF reverse
gatgcactttttgcccttctt

SEQ ID NO: 172 - DNA, 19 bp, Artificial Sequence
  synthetic human qPCR oligonucleotide RND3 forward
aaaaactgcgctgctccat

SEQ ID NO: 173 - DNA, 21 bp, Artificial Sequence
  synthetic human qPCR oligonucleotide RND3 reverse
tcaaaactggccgtgtaattc

SEQ ID NO: 174 - DNA, 20 bp, Artificial Sequence
  synthetic human qPCR oligonucleotide KLF6 forward
aaagctcccacttgaaagca

SEQ ID NO: 175 - DNA, 21 bp, Artificial Sequence
  synthetic human qPCR oligonucleotide KLF6 reverse
ccttcccatgagcatctgtaa

SEQ ID NO: 176 - DNA, 18 bp, Artificial Sequence
  synthetic human qPCR oligonucleotide BCL6 forward
ttccgctacaagggcaac

SEQ ID NO: 177 - DNA, 20 bp, Artificial Sequence
  synthetic human qPCR oligonucleotide BCL6 reverse
tgcaacgatagggtttctca

SEQ ID NO: 178 - DNA, 20 bp, Artificial Sequence
  synthetic human qPCR oligonucleotide FOXA1 forward
agggctggatggttgtattg

SEQ ID NO: 179 - DNA, 18 bp, Artificial Sequence
  synthetic human qPCR oligonucleotide FOXA1 reverse
accgggacggaggagtag

SEQ ID NO: 180 - DNA, 18 bp, Artificial Sequence
  synthetic human qPCR oligonucleotide GDF15 forward
ccggatactcacgccaga

SEQ ID NO: 181 - DNA, 20 bp, Artificial Sequence
  synthetic human qPCR oligonucleotide GDF15 reverse
agagatacgcaggtgcaggt

SEQ ID NO: 182 - DNA, 18 bp, Artificial Sequence
  synthetic human qPCR oligonucleotide HBP1 forward
gctggtggtgttgtcgtg

SEQ ID NO: 183 - DNA, 22 bp, Artificial Sequence
  synthetic human qPCR oligonucleotide HBP1 reverse
catgttatggtgctctgactgc

SEQ ID NO: 184 - DNA, 20 bp, Artificial Sequence
  synthetic human qPCR oligonucleotide Twist1 forward
catcctcacacctctgcatt

SEQ ID NO: 185 - DNA, 20 bp, Artificial Sequence
  synthetic human qPCR oligonucleotide Twist1 reverse
ttcctttcagtggctgattg

SEQ ID NO: 186 - DNA, 23 bp, Artificial Sequence
  synthetic human qPCR oligonucleotide LEF1 forward
ccttggtgaacgagtctgaaatc

SEQ ID NO: 187 - DNA, 20 bp, Artificial Sequence
  synthetic human qPCR oligonucleotide LEF1 reverse
gaggtttgtgcttgtctggc

SEQ ID NO: 188 - DNA, 20 bp, Artificial Sequence
  synthetic human qPCR oligonucleotide rpS19 forward
gctggccaaacataaagagc

SEQ ID NO: 189 - DNA, 20 bp, Artificial Sequence
  synthetic human qPCR oligonucleotide rpS19 reverse
ctgggtctgacaccgtttct

SEQ ID NO: 190 - DNA, 19 bp, Artificial Sequence
  synthetic human qPCR oligonucleotide 5S rRNA forward
gcccgatctcgtctgatct

SEQ ID NO: 191 - DNA, 20 bp, Artificial Sequence
  synthetic human qPCR oligonucleotide 5S rRNA reverse
agcctacagcacccggtatt

SEQ ID NO: 192 - DNA, 20 bp, Artificial Sequence
  synthetic human qPCR oligonucleotide firefly luciferase forward
aatcaaagaggcgaactgtg

SEQ ID NO: 193 - DNA, 20 bp, Artificial Sequence
  synthetic human qPCR oligonucleotide firefly luciferase reverse
ttcgtcttcgtcccagtaag

SEQ ID NO: 194 - DNA, 20 bp, Artificial Sequence
  synthetic mouse qPCR oligonucleotide beta actin forward
ctaaggccaaccgtgaaaag

SEQ ID NO: 195 - DNA, 20 bp, Artificial Sequence
  synthetic mouse qPCR oligonucleotide beta actin reverse
accagaggcatacagggaca

SEQ ID NO: 196 - DNA, 20 bp, Artificial Sequence
  synthetic mouse qPCR oligonucleotide Yb1 forward
gggttacagaccacgattcc

SEQ ID NO: 197 - DNA, 18 bp, Artificial Sequence
  synthetic mouse qPCR oligonucleotide Yb1 reverse
ggcgataccgacgttgag

SEQ ID NO: 198 - DNA, 20 bp, Artificial Sequence
  synthetic mouse qPCR oligonucleotide vimentin forward
tccagcagcttcctgtaggt

SEQ ID NO: 199 - DNA, 20 bp, Artificial Sequence
  synthetic mouse qPCR oligonucleotide vimentin reverse
ccctcacctgtgaagtggat

SEQ ID NO: 200 - DNA, 20 bp, Artificial Sequence
  synthetic mouse qPCR oligonucleotide Cd44 forward
acagtaccttacccaccatg

SEQ ID NO: 201 - DNA, 20 bp, Artificial Sequence
  synthetic mouse qPCR oligonucleotide Cd44 reverse
ggatgaatcctcggaattac

SEQ ID NO: 202 - DNA, 20 bp, Artificial Sequence
  synthetic mouse qPCR oligonucleotide Mta1 forward
agtgcgcctaatccgtggtg

SEQ ID NO: 203 - DNA, 22 bp, Artificial Sequence
  synthetic mouse qPCR oligonucleotide Mta1 reverse
ctgaggatgagagcagctttcg

SEQ ID NO: 204 - RNA, 19 nt, Artificial Sequence
  synthetic siRNA/shRNA Control (D-001810-01) sequence
ugguuuacaugucgacuaa

SEQ ID NO: 205 - RNA, 19 nt, Artificial Sequence
  synthetic siRNA/shRNA vimentin (L-003551) sequence
ucacgaugaccuugaauaa

SEQ ID NO: 206 - RNA, 19 nt, Artificial Sequence
  synthetic siRNA/shRNA vimentin (L-003551) sequence
ggaaauggcucgucaccuu

SEQ ID NO: 207 - RNA, 19 nt, Artificial Sequence
  synthetic siRNA/shRNA vimentin (L-003551) sequence
gagggaaacuaaucuggau

SEQ ID NO: 208 - RNA, 19 nt, Artificial Sequence
  synthetic siRNA/shRNA vimentin (L-003551) sequence
uuaagacgguugaaacuag

SEQ ID NO: 209 - RNA, 19 nt, Artificial Sequence
  synthetic siRNA/shRNA YB1 (L-10213) sequence
cugaguaaaugccggcuua

SEQ ID NO: 210 - RNA, 19 nt, Artificial Sequence
  synthetic siRNA/shRNA YB1 (L-10213) sequence
cgacgcagacgcccagaaa

SEQ ID NO: 211 - RNA, 19 nt, Artificial Sequence
  synthetic siRNA/shRNA YB1 (L-10213) sequence
guaaggaacggauaugguu

SEQ ID NO: 212 - RNA, 19 nt, Artificial Sequence
  synthetic siRNA/shRNA YB1 (L-10213) sequence
gcggaggcagcaaauguua

SEQ ID NO: 213 - RNA, 19 nt, Artificial Sequence
  synthetic siRNA/shRNA MTA1 (L-004127) sequence
ucacggacauucagcaaga

SEQ ID NO: 214 - RNA, 19 nt, Artificial Sequence
  synthetic siRNA/shRNA MTA1 (L-004127) sequence
ggaccaaaccgcaguaaca

SEQ ID NO: 215 - RNA, 19 nt, Artificial Sequence
  synthetic siRNA/shRNA MTA1 (L-004127) sequence
gcaucuuguuggacauauu

SEQ ID NO: 216 - RNA, 19 nt, Artificial Sequence
  synthetic siRNA/shRNA MTA1 (L-004127) sequence
ccagcaucauugaguacua

SEQ ID NO: 217 - RNA, 19 nt, Artificial Sequence
  synthetic siRNA/shRNA CD44 (L-009999) sequence
gaauauaaccugccgcuuu

SEQ ID NO: 218 - RNA, 19 nt, Artificial Sequence
  synthetic siRNA/shRNA CD44 (L-009999) sequence
caaguggacucaacggaga

SEQ ID NO: 219 - RNA, 19 nt, Artificial Sequence
  synthetic siRNA/shRNA CD44 (L-009999) sequence
cgaagaaggugugggcaga

SEQ ID NO: 220 - RNA, 19 nt, Artificial Sequence
  synthetic siRNA/shRNA CD44 (L-009999) sequence
gaucaacaguggcaaugga

SEQ ID NO: 221 - RNA, 19 nt, Artificial Sequence
  synthetic siRNA/shRNA 4EBP1 (L-003005) sequence
cugauggagugucggaacu

SEQ ID NO: 222 - RNA, 19 nt, Artificial Sequence
  synthetic siRNA/shRNA 4EBP1 (L-003005) sequence
caucuaugaccggaaauuc

SEQ ID NO: 223 - RNA, 19 nt, Artificial Sequence
  synthetic siRNA/shRNA 4EBP1 (L-003005) sequence
gcaauagcccagaagauaa

SEQ ID NO: 224 - RNA, 19 nt, Artificial Sequence
  synthetic siRNA/shRNA 4EBP1 (L-003005) sequence
gagauggacauuuaaagca

SEQ ID NO: 225 - RNA, 19 nt, Artificial Sequence
  synthetic siRNA/shRNA 4EBP2 (L-018671) sequence
gcagcuaccucaugacuau

SEQ ID NO: 226 - RNA, 19 nt, Artificial Sequence
  synthetic siRNA/shRNA 4EBP2 (L-018671) sequence
ggaggaacucgaaucauuu

SEQ ID NO: 227 - RNA, 19 nt, Artificial Sequence
  synthetic siRNA/shRNA 4EBP2 (L-018671) sequence
gcaauucucccauggcuca

SEQ ID NO: 228 - RNA, 19 nt, Artificial Sequence
  synthetic siRNA/shRNA 4EBP2 (L-018671) sequence
uugaacaacuugaacaauc

SEQ ID NO: 229 - RNA, 19 nt, Artificial Sequence
  synthetic siRNA/shRNA rictor (LL-016984) sequence
gacacaagcacuucgauua

SEQ ID NO: 230 - RNA, 19 nt, Artificial Sequence
  synthetic siRNA/shRNA rictor (LL-016984) sequence
gaagauuuauugaguccua

SEQ ID NO: 231 - RNA, 19 nt, Artificial Sequence
  synthetic siRNA/shRNA rictor (LL-016984) sequence
gcgagcugauguagaauua

SEQ ID NO: 232 - RNA, 19 nt, Artificial Sequence
  synthetic siRNA/shRNA rictor (LL-016984) sequence
gggaauacaacuccaaaua

SEQ ID NO: 233 - DNA, 19 bp, Artificial Sequence
  synthetic siRNA/shRNA PTEN (SH-003023-01-10) sequence
gctaagagaggtttccgaa

SEQ ID NO: 234 - DNA, 19 bp, Artificial Sequence
  synthetic siRNA/shRNA PTEN (SH-003023-02-10) sequence
agactgatgtgtatacgta

SEQ ID NO: 235 - DNA, 1692 bp, Homo sapiens
  general transcription factor IIA, 1-like transcript variant 1 (GTF2A1L), TFIIA-alpha and beta-like factor (ALF)
  CDS (78)...(1514): GTF2A1L
aaaacgtgcccagtgtttccctccgagggcactgcgtgccgcgcaggcgcaaagggccaggtgctggaggtgctgtcatggcctgcctcaacccggtgcctaaactctacagatctgtaattgaagatgtaattgaaggagttcggaatctatttgctgaagaaggtatagaggaacaagttttaaaagacttgaagcagctctgggaaaccaaggttttgcagtctaaagcaacagaagacttcttcagaaatagcatccaatcacctctgtttactcttcagttgccgcacagcttgcaccaaacattgcaatcgtcaacagcatcattagttattcctgctggtagaactcttccaagttttaccacagcagaactgggcacttcaaactccagtgcaaactttacttttcctggttatcccattcatgtaccagcaggtgtgacactacagactgtatctggtcacctttataaagtcaatgtaccaattatggtgacagagacttctggaagagcaggtattcttcagcatccaattcagcaagtatttcaacagcttggccagccttcagtaatacaaactagtgttccacaattgaatccatggtctcttcaagcaactactgaaaaatcacagagaattgaaaccgtgctacagcaacccgcaattctaccttctgggccagtagataggaaacacttagaaaatgccaccagtgatatacttgtatctcctggaaatgagcataaaatcgtgcctgaagctttgttgtgtcatcaggaaagttctcactatatcagtcttccaggtgttgtattttctccacaggtctctcaaacaaattctaatgtggagtcagtgctcagtggttcagctagcatggctcaaaatctgcatgatgagtccctctccacaagccctcatggggctctccaccagcacgtgactgatattcagcttcatattcttaaaaataggatgtatggatgtgattctgtaaagcaaccaagaaatatagaggaacccagcaacatacctgtatcagagaaggattctaattctcaggtggatttaagcattcgggttactgatgatgatattggtgaaataattcaagtagatggaagcggtgatacatcttccaatgaagaaataggaagtacaagagatgcagatgagaatgaatttctagggaatattgacgggggagatctgaaggtacctgaagaagaagctgacagtatttcaaatgaggattcagccacaaacagtagtgataatgaagaccctcaagtaaacattgtagaagaggaccctttaaattctggagatgatgttagtgaacaggatgtgccagacctgtttgacacggataatgttattgtctgtcagtatgataagattcatcgaagcaagaacaaatggaaattctatttgaaagatggtgttatgtgttttggagggagagactatgtatttgcaaaagccattggtgatgcagagtggtaaaccttgtgagctcagtacatctattttgtgaacatcagttggattatattgcatattgtgaattcatttttattttgaatatagtccagcacagagctgttcaaatttttagttcactgtatggaatttaataaaattataattcagatgcagatacaattacacaaaaaaaaaaaaa

SEQ ID NO: 236 - DNA, 6860 bp, Homo sapiens
  semaphorin-6A precursor, semaphorin VIA, semaphorin-6A-1 (SEMA6A, sema VIa, SEMA6A-1, SEMA, SEMA6A1, SEMAQ), HT018, VIA
  CDS (710)...(3802): SEMA6A
ctccgcccgggagcggcggcctctccggtgacagaggagtagtgagcggcacggggtgaggctgcagccaactccgctccccgcgcactcggctgcccaggcgctcggaacccagcagcggcgctcctccgcggtgccggtcgcccgcgatgcccgcttagcagcgtgtagcagcggccagcatcaccacacccgcggcaccgcgctgccggccgcagagccgggccagagccttgcacccctgccccagcccccaccccgccccccgccctgaaatgacttgttaatcggcgcagacaccaccaaggggactcaccgaagtggaatccaagtggaatttggatttggagaagagtttcttgaacatttaccctcttccttgttggttttctttttctttttcttctttttttttttggcttcttttttcctctccccttctccgctcgtcattggagatgaacacatcgcgtttgcatcccagaaagtagtcgccgcgactatttcccccaaagagacaagcacacatgtaggaatgacaaaggcttgcgaaggagagagcgcagcccgcggcccggagagatcccctcgataatggattactaaatgggatacacgctgtaccagttcgctccgagccccggccgcctgtccgtcgatgcaccgaaaagggtgaagtagagaaataaagtctccccgctgaactactatgaggtcagaagccttgctgctatatttcacactgctacactttgctggggctggtttcccagaagattctgagccaatcagtatttcgcatggcaactatacaaaacagtatccggtgtttgtgggccacaagccaggacggaacaccacacagaggcacaggctggacatccagatgattatgatcatgaacggaaccctctacattgctgctagggaccatatttatactgttgatatagacacatcacacacggaagaaatttattgtagcaaaaaactgacatggaaatctagacaggccgatgtagacacatgcagaatgaagggaaaacataaggatgagtgccacaactttattaaagttcttctaaagaaaaacgatgatgcattgtttgtctgtggaactaatgccttcaacccttcctgcagaaactataagatggatacattggaaccattcggggatgaattcagcggaatggccagatgcccatatgatgccaaacatgccaacgttgcactgtttgcagatggaaaactatactcagccacagtgactgacttccttgccattgacgcagtcatttaccggagtcttggagaaagccctaccctgcggaccgtcaagcacgattcaaaatggttgaaagaaccatactttgttcaagccgtggattacggagattatatctacttcttcttcagggaaatagcagtggagtataacaccatgggaaaggtagttttcccaagagtggctcaggtttgtaagaatgatatgggaggatctcaaagagtcctggagaaacagtggacgtcgttcctgaaggcgcgcttgaactgctcagttcctggagactctcatttttatttcaacattctccaggcagttacagatgtgattcgtatcaacgggcgtgatgttgtcctggcaacgttttctacaccttataacagcatccctgggtctgcagtctgtgcctatgacatgcttgacattgccagtgtttttactgggagattcaaggaacagaagtctcctgattccacctggacaccagttcctgatgaacgagttcctaagcccaggccaggttgctgtgctggctcatcctccttagaaagatatgcaacctccaatgagttccctgatgataccctgaacttcatcaagacgcacccgctcatggatgaggcagtgccctccatcttcaacaggccatggttcctgagaacaatggtcagataccgccttaccaaaattgcagtggacacagctgctgggccatatcagaatcacactgtggtttttctgggatcagagaagggaatcatcttgaagtttttggccagaataggaaatagtggttttctaaatgacagccttttcctggaggagatgagtgtttacaactctgaaaaatgcagctatgatggagtcgaagacaaaaggatcatgggcatgcagctggacagagcaagcagctctctgtatgttgcgttctctacctgtgtgataaaggttccccttggccggtgtgaacgacatgggaagtgtaaaaaaacctgtattgcctccagagacccatattgtggatggataaaggaaggtggtgcctgcagccatttatcacccaacagcagactgacttttgagcaggacatagagcgtggcaatacagatggtctgggggactgtcacaattcctttgtggcactgaatgggcattccagttccctcttgcccagcacaaccacatcagattcgacggctcaagaggggtatgagtctaggggaggaatgctggactggaagcatctgcttgactcacctgacagcacagaccctttgggggcagtgtcttcccataatcaccaagacaagaagggagtgattcgggaaagttacctcaaaggccacgaccagctggttcccgtcaccctcttggccattgcagtcatcctggctttcgtcatgggggccgtcttctcgggcatcaccgtctactgcgtctgtgatcatcggcgcaaagacgtggctgtggtgcagcgcaaggagaaggagctcacccactcgcgccggggctccatgagcagcgtcaccaagctcagcggcctctttggggacactcaatccaaagacccaaagccggaggccatcctcacgccactcatgcacaacggcaagctcgccactcccggcaacacggccaagatgctcattaaagcagaccagcaccacctggacctgacggccctccccaccccagagtcaaccccaacgctgcagcagaagcggaagcccagccgcggcagccgcgagtgggagaggaaccagaacctcatcaatgcctgcacaaaggacatgccccccatgggctcccctgtgattcccacggacctgcccctgcgggcctcccccagccacatccccagcgtggtggtcctgcccatcacgcagcagggctaccagcatgagtacgtggaccagcccaaaatgagcgaggtggcccagatggcgctggaggaccaggccgccacactggagtataagaccatcaaggaacatctcagcagcaagagtcccaaccatggggtgaaccttgtggagaacctggacagcctgccccccaaagttccacagcgggaggcctccctgggtcccccgggagcctccctgtctcagaccggtctaagcaagcggctggaaatgcaccactcctcttcctacggggttgactataagaggagctaccccacgaactcgctcacgagaagccaccaggccaccactctcaaaagaaacaacactaactcctccaattcctctcacctctccagaaaccagagctttggcaggggagacaacccgccgcccgccccgcagagggtggactccatccaggtgcacagctcccagccatctggccaggccgtgactgtctcgaggcagcccagcctcaacgcctacaactcactgacaaggtcggggctgaagcgtacgccctcgctaaagccggacgtaccccccaaaccatcctttgctcccctttccacatccatgaagcccaatgatgcgtgtacataatcccagggggagggggtcaggtgtcgaaccagcaggcaaggcgaggtgcccgctcagctcagcaaggttctcaactgcctcgagtacccaccagaccaagaaggcctgcggcagagccgaggacgctgggtcctcctctctgggacacaggggtactcacgaaaactgggccgcgtggtttggtgaaggtttgcaacggcggggactcaccttcattctcttccttcactttcccccacaccctacaacaggtcggacccacaaaagacttcagttatcatcacaaacatgagccaaaagcacatacctaccccatcccccacccccacacacacacacacacacacatgcacacaacacatacacacacacgcacagaggtgaacagaaactgaaacattttgtccacaacttcacgggacgtggccagactgggtttgcgttccaacctgcaaaacacaaatacattttttaaaatcaagaaaatttaaaaagacaaaaaaaaaagaattcattgataattctaactcagactttaacaatggcagaagtttactatgcgcaaatactgtgaaatgcccgccagtgttacagctttctgttgcagcagataaatgccatgttgggcaactatgtcatagatttctgctcctcctctcttttaatgaaataacgtgaccgttaacgcaagtaactctttatttattgttcaccctttttttccttaaggaaaggactcttccaaatatcatcctatgaacagctcttcagaaagcccattgaaagttaaactatttaacgtgaaatccattaactggaataattgagtttctttatttttacaataaattcactgagtaaataagttggagctggaattctgagctttgtgtttggactgtctggtctgtagctaaaggaaaaagttaggaggggaatatttatttaaatctatcagttcattgcctggtcaggtctctggcctataaacatgcaaaaaaactaattcatgttaaagtccttccagatcctaatttctaaagcaatcaggagagaaagcttttagaatggcacatcatatctcattgatgccaacatggttttgtccatggttctgactttctgtgaaggcaccagcttgcaatatgccatcccatttcaccttgcatgtgagacagcaaacaaaatccacaaatggtgtgaactaatatgctggctgctaccttgcataaattaatgatttgatcacacgggttcttcgtggggttacatctgtgaatagcctgttttccacatgtaaatttgtgccttacaccttgagttgtgtacacttgtaaactctttatgatcaactgttcccccttttgaaataagtgcagatatttatttaaccctcccttccccaccctctgccccacttccagccctctgaaagattggagtcaagcagatggaagaatgcagtggtgatagttgtcatgcgacagcctgagaacgctgggcagcaccacaccctccaattcacactgccttctagttgtgccaactggaaccaccctttggctgtgctgcgaagcatggaccccagtgttgttgtgggtgtgtcaaatcccctttcatcctcaagagctccctgcttcccttagattatttcaatacggtgatatccttatttgctagcagaaaagggactaacgtcccattcctcttttctgctgcgtccactggctagagagcaggcggtgcgcggttgggcagacacctgggaggagtctccaagccatgtgcacagcacacacgtgcagtgcacacaaagaaatgacatggaaatagatgcaggcaggctggtccctgctgtgattaacgagtaactccaagtacaaggccgaccacaatggatgctgcaaaaacgttgactggggcaaaggattttttattttattttttattttgttaattatgtttttaggggatgggaggtggtgtgtgtttttctcctcttggttttcatttgctcaagcacacaaaagggacttttgtttactctatcatgaacaaaggaactgtccacatactgtaaaccatgagcagtgttgttgttgtttttttaaacagtatatttggtggtctctttgtctgcttttatttccagttcgatcttctgggtttagttttgtctttaaaaagaattcaaaaaaagactgacaatgacagttttgagttggatagtgaaaaagtggagcctccataatcagtgtggttgccttcagacctgagtacttagctgagggtgggtgagagccctttgttccaaaagtccattagttttgctgttgtttaggagtaggtggttgttgttgtttttactttttttttttttggcttttgtaatggaatccatgttcacatcctgtgaactctgtctcctgaaaccctgaagtatttcctagaacctgaaatattgttttcttccttgaattttctctagaaatgcagaaattaggaaggtgatgggtctgtatccccctgcccccttctttcccatgcttgactcccgagagtactggcagtgcagcacccatcattgacgtaagcggctgtcttgtccagtgtttgtaggcatcactgcctcagctgttaaggagacctgtgtcaaaacttacatccacattcctacacccccacaacccatcacttctggtgttaaccctaaaatacccacatgtattgagctggtcttctgcatttaagtatttctccccagtttttttccccactgtgtgtggggggagggtccataaacccgagtgtgcctttgctttccacccttgctagacactggtagatgcaacaaactcagatttatatttgttgtaaagttgtaaaaatattgtgatgtcaccaattttccttccatctccacatcccctaacatctgattcacgacttaatgtatgttgtaagaaaagaaaaaagaaaagaaaaaaagggaaaaaagaaaagcaaggaaaaggctctttattacttaaaagtaataaaacctgactgttctatatta

SEQ ID NO: 237 - DNA, 3152 bp, Homo sapiens
  hydrocephalus-inducing protein homolog transcript variant 3 (HYDIN, HYDIN1; HYDIN2), axonemal central pair apparatus protein, protein phosphatase 1, regulatory subunit 31 (PPP1R31), CILD5
  CDS (36)...(2888): HYDIN
accgtggcaacggacggcaacagctcgggcggcgcatggagagtgcgggcggcttcaagctgggtatggagcccctcagcggcggcggggtctgtgagaaaaaaaaattactaaaaatgacaagtagaagacttgaggagtccatgggggctgttcagatgggattggtcaatatgttcaaaggatttcaaagcaaggttttgccacccctgagtccaaaggtggttacagaagaagaagtaaaccgaatgcttacaccctcagagttcctgaaggaaatgtccctgaccaccgagcagagactggcaaaaacacgtttgatgtgccgaccacagatcatcgaactcttagatatgggggaaacaacacatcagaagttttcaggaattgacctggatcaggcattattccagccctttccatcagaaattatatttcagaactacactccctgtgaagtctatgaagttccactgattttgaggaacaatgacaaaattccaaggttggtgaaagttgtggaagaaagttcgccttactttaaagtaatcagccccaaagatattggccacaaagtggctcctggagtgccttccatattccgaatcctctttactccagaggagaacaaggattacgcccatacgttgacctgtgttactgaaagagaaaagtttattgtacccatcaaagctagaggggcacgagccattctcgattttcctgacaagctgaatttttccacttgtcctgtcaaatacagcacccagaagattctgctggtacgaaacattggcaacaaaaatgctgtatttcacatcaaaacttgtaggcctttctctatagaaccagctattggaactcttaatgtgggagagtccatgcaactggaagtggagtttgagccacagagtgtgggcgatcacagtggaagacttatcgtgtgttatgacacaggtgaaaaggtgtttgtatctctctatggagctgccatagacatgaatataaggctggataagaattccttgaccatcgagaaaacctacatatctctggccaatcagcgaactataaccattcacaatcgcagtaatatcattgcccatttcctgtggaaggtatttgctacccagcaagaagaggacagagaaaaatatagggcctgtgatgatctgatcaaagaggagaaggatgagactgatgagttttttgaagagtgcattactgatcctttactccgagaacatctttctgttctgtcccgaacctttgcgaatcagaggaggctggtgcagggagacagcaagctgttcttcaataacgttttcactgtggagcccctggaaggtgatgtctggcccaactcatcagctgaaatcaccgtgtactttaacccactagaagccaagctctatcaacagaccatttactgcgacattttaggccgagaaatccgtctgcccctccgaatcaaaggggaaggcatgggacctaagattcacttcaactttgaattgctggatattgggaaagttttcactggatctgcacattgttatgaggcgatactgtacaacaaaggcagcatcgatgctctcttcaacatgacccctccaacttcagctttgggggcctgctttgttttcagtcccaaggaaggcatcattgaaccaagtggagtccaagctatccagatctccttcagctctaccatcctgggaaactttgaagaagagttcctggtcaatgtcaatgggtcacctgagcctgtgaaactgaccattagaggctgtgtcattggacctaccttccattttaatgttccagctctgcactttggtgatgtttcctttgggtttcctcataccttgatatgttccctcaataatacctctttgatccccatgacttacaaactgcgtatccctggggatggccttggccataaaagcatttcatattgtgagcagcatgtggactacaaaagaccatcttggaccaaggaagaaatatcctcaatgaaaccaaaagaattcaccatctctcctgactgtggcaccattcgcccccagggatttgctgctatcagggtgacattatgctccaacactgtgcagaaatacgagctggcactcgtggtggacgtggagggcatcggagaagaggtgctggcgctcttaattacagcaaggtgtgttgtacctgccctccacctggtcaatacagaggtggactttgggcactgcttcctgaagtacccgtatgagaaaacactccagcttgccaatcaagatgacctcccaggattctatgaggtccagcctcaggtgtgtgaggaggtgcctactgtgctgttttccagccccacccccagcggggtcatctccccaagcagcaccatccacataccactggtcctggagacccaggtcactggagaacacagatccacggtttacatctcaatctttgggagccaggacccccctttggtatgtcacttaaagagcgctggagaaggcccagttatctacgtccatcccaatcaagtggacttcgggaatatctacgtcctaaaagactcttccaggattctcaacctatgcaaccagtccttcattcccgcatttttccaggcacacatggcacacaaaaaatccctttggacgattgaacccaatgaaggcatggttcctccagaaactgatgttcaactggcactgaccgccaacctgaatgacacactgacattcaaggactgtgttattttggacattgaaaatagcagtacctatcggattcctgttcaggcttccggaactggttccactattgtttcagataagccctttgctccagaactcaatttgggggcacattttaggtaaggaaatctcatggaccagtttttatagatatcacatatgttacatatgctgagcatcacctctactttagaaaattattttaagtaattaaaactagccacctcagtccctctcctttcccatcctcactcttccacctcctgatgtgtatgtcagcaacaagaagacattttctagccataacttggttgcattctctaatccgtgtccctctacatccgagaagaatatggtttgtaggaaatgcattcttttctcaaactg

SEQ ID NO: 238 - DNA, 1885 bp, Homo sapiens
  killer cell immunoglobulin-like receptor 3DL2 transcript variant 1 (KIR3DL2), natural killer cell inhibitory receptor, CD158 antigen-like family member K (CD158K)
  CDS (34)...(1401): KIR3DL2
ggggcgcggcctcctgtctgcaccggcagcaccatgtcgctcacggtcgtcagcatggcgtgcgttgggttcttcttgctgcagggggcctggccactcatgggtggtcaggacaaacccttcctgtctgcccggcccagcactgtggtgcctcgaggaggacacgtggctcttcagtgtcactatcgtcgtgggtttaacaatttcatgctgtacaaagaagacagaagccacgttcccatcttccacggcagaatattccaggagagcttcatcatgggccctgtgaccccagcacatgcagggacctacagatgtcggggttcacgcccacactccctcactgggtggtcggcacccagcaaccccctggtgatcatggtcacaggaaaccacagaaaaccttccctcctggcccacccagggcccctgctgaaatcaggagagacagtcatcctgcaatgttggtcagatgtcatgtttgagcacttctttctgcacagagaggggatctctgaggacccctcacgcctcgttggacagatccatgatggggtctccaaggccaacttctccatcggtcccttgatgcctgtccttgcaggaacctacagatgttatggttctgttcctcactccccctatcagttgtcagctcccagtgaccccctggacatcgtgatcacaggtctatatgagaaaccttctctctcagcccagccgggccccacggttcaggcaggagagaacgtgaccttgtcctgtagctcctggagctcctatgacatctaccatctgtccagggaaggggaggcccatgaacgtaggctccgtgcagtgcccaaggtcaacagaacattccaggcagactttcctctgggccctgccacccacggagggacctacagatgcttcggctctttccgtgccctgccctgcgtgtggtcaaactcaagtgacccactgcttgtttctgtcacaggaaacccttcaagtagttggccttcacccacagaaccaagctccaaatctggtatctgcagacacctgcatgttctgattgggacctcagtggtcatcttcctcttcatcctcctcctcttctttctcctttatcgctggtgctccaacaaaaagaatgctgctgtaatggaccaagagcctgcgggggacagaacagtgaataggcaggactctgatgaacaagaccctcaggaggtgacgtacgcacagttggatcactgcgttttcatacagagaaaaatcagtcgcccttctcagaggcccaagacacccctaacagataccagcgtgtacacggaacttccaaatgctgagcccagatccaaagttgtctcctgcccacgagcaccacagtcaggtcttgagggggttttctagggagacaacagccctgtctcaaaaccaggttgccagatccaatgaaccagcagctggaatctgaaggcatcagtctgcatcttaggggatcgctcttcctcacaccacgaatctgaacatgcctctctcttgcttacaaatgcctaaggtcgccactgcctgctgcagagaaaacacactcctttgcttagcccacaagtatctatttcacttgacccctgcccacctctccaacctaactggcttacttcctagtcctacttgaggctgcaatcacactgaggaactcacaattccaaacatacaagaggctccctcttaacacggcacttacacacttgctgttccaccttccctcatgctgttccacctcccctcagactatctttcagccttctgtcatcagtaaaatttataaattttttttataacttcagtgtagctctctcctcttcaaataaacatgtctgccctcatggtttcg

SEQ ID NO: 239 - DNA, 2005 bp, Homo sapiens
  bystin-like (BYSL), bystin, by the ribosomal protein s6 gene, drosophila, homolog-like
  CDS (337)...(1650): BYSL
gcggattcccgccccgaggtttctaaatccagacattcccgtttggctgagcactctaggcctacatccatgaagctaggagagcgacactcaaagactgcactattgagagaagctaacgttaaaggcagtgaatatattcgggagtccagctccggaacccgggagctcttttagtgggaggggcggcgctgatggcgcttctggcctccgaatgctagggggcgctgtgatcgccgggcggcctcttgggcgctgggagtccaccgcgcaagcgcatcctggcctttcttcagtccccacgtgcgatccttcccggcaactttttcgagaaaaatgcccaaattcaaggcggcccgtggggtggggggtcaggaaaaacatgcgcccctggccgatcagatcctggctgggaatgcggtgcgggcgggggtccgggagaagcggcggggtcgcgggacaggagaagcggaggaagagtatgtggggccccggctgagccgacggattttgcagcaagcacggcagcaacaggaggaactcgaggccgagcatgggactggggacaagcccgcggcgccgcgggaacgcaccacgcggctgggtccaagaatgcctcaggatggatcagatgacgaggacgaggagtggcccaccctggagaaggctgccacaatgacagcagcgggccatcatgcagaggtggttgtggaccctgaggatgagcgtgccatagagatgttcatgaacaagaaccctcctgccaggcgcaccctggctgacatcatcatggagaagctgactgagaagcagacagaggttgagacagtcatgtcagaggtgtcgggcttccctatgccccagctggacccccgggtcctagaagtgtacaggggggtccgggaggtattatctaagtaccgcagtggaaaactgcccaaggcatttaagatcatccctgcactctccaactgggagcaaatcctctacgtcacagagccggaggcctggactgcagctgccatgtaccaggccaccaggatttttgcctctaacctgaaggaacgcatggcccagcgcttctacaaccttgtcctgctccctcgagtacgagatgacgttgctgaatacaaacgactcaacttccatctctacatggctctcaagaaggcccttttcaaacctggagcctggttcaaagggatcctgattccactgtgcgagtctggcacttgtaccctccgggaagccatcattgtgggtagcatcatcaccaagtgctccatccctgtgttgcactccagtgcggccatgctgaaaattgctgagatggaatacagcggtgccaacagcatcttcctgcgactgctgctggataagaagtatgcactgccttaccgggtgctggatgccctagtcttccacttcctggggttccggacagagaagcgtgaactgcctgtgctgtggcaccagtgcctcctgactttggtccagcgctacaaggccgacttggccacagaccagaaagaggccctcttagaactgctccggctgcagccccatccacagctatcgcccgaaatcaggcgtgagcttcagagtgcagtcccccgcgatgtggaagatgttcccatcaccgtggagtgaggaaaacagtcagctgtcctggccaaaggggtttggaaggacaccaagacccccgttggtgactgaagatgacactgagctttaatggctgaagacccagatcagggcagtgacagatcacagggacatctgtggctcccagtccaggacaggaaggactgagggtctggctggttccctcttccattctaggcccttatccctgtttagttctgagagccaacttgagataccatatgctagcattcccagtccccagctggggcttggtgtgagtactttttctatggctattgtgtcaggtcactgtggataaaggcaaagacagatatttattgaaaaaaaaaaaaaaaaa

SEQ ID NO: 240 - DNA, 3392 bp, Homo sapiens
  ELOVL family member 6, elongation of long chain fatty acids (FEN1/Elo2, SUR4/Elo3-like, yeast), ELOVL fatty acid elongase 6 (ELOVL6), fatty acyl-CoA elongase, 3-keto acyl-CoA synthase ELOVL6, very-long-chain 3-oxoacyl-CoA synthase 6
  CDS (330)...(1127): ELOVL6
gagatttccctgtagacgagtaaaaagggtgatggacaaacgtgcgggcactaagaccgcaaggcattcatttcctcctacggtggatgcggacgccgggaggaggagagccccagagagaggagctgggagcggaggcgcaggcaatgctcagccctggatgtagctgagaggctgggagaagagacgaccgctggagaccgagcggcgtggggaagacctaggggggtgggtgggggaagcagacaggagaacactcgaaatcaagcgctttacagattattttattttgtatagagaacacgtagcgactccgaagatcagccccaatgaacatgtcagtgttgactttacaagaatatgaattcgaaaagcagttcaacgagaatgaagccatccaatggatgcaggaaaactggaagaaatctttcctgttttctgctctgtatgctgcctttatattcggtggtcggcacctaatgaataaacgagcaaagtttgaactgaggaagccattagtgctctggtctctgacccttgcagtcttcagtatattcggtgctcttcgaactggtgcttatatggtgtacattttgatgaccaaaggcctgaagcagtcagtttgtgaccagggtttttacaatggacctgtcagcaaattctgggcttatgcatttgtgctaagcaaagcacccgaactaggagatacaatattcattattctgaggaagcagaagctgatcttcctgcactggtatcaccacatcactgtgctcctgtactcttggtactcctacaaagacatggttgccgggggaggttggttcatgactatgaactatggcgtgcacgccgtgatgtactcttactatgccttgcgggcggcaggtttccgagtctcccggaagtttgccatgttcatcaccttgtcccagatcactcagatgctgatgggctgtgtggttaactacctggtcttctgctggatgcagcatgaccagtgtcactctcactttcagaacatcttctggtcctcactcatgtacctcagctaccttgtgctcttctgccatttcttctttgaggcctacatcggcaaaatgaggaaaacaacgaaagctgaatagtgttggaactgaggaggaagccatagctcagggtcatcaagaaaaataatagacaaaagaaaatggcacaaggaatcacacgtggtgcagctaaaacaaaacaaaacatgagcaaacacaaaacccaaggcagcttagggataattaggttgatttaacccagtaagtttatgatccttttagggtgaggactcactgagtgcacctccatctccaagcactgctgctggaagaccccattccctctttatctatcaactctaggacaagggagaacaaaagcaagccagaagcagaggagactaatcaaaggcaaacaaaggctattaacacataggaaaaaatgtatttactaagtgtcacatttctctaagatgaaagatttttactctagaaactgtgcgagcacaacacacacaatcctttctaactttatggacactaaactggagccaatagaaaagacaaaaatgaaagagacacagggtgtatatctagaacgataatgcttttgcagaaactaaagcctttttaagaaatgccagctgctgtagaccccatgagaaaagatgtcttaatcatccttatgaaaacagatgtaaacaactatatttcaactaacttcatcttcactgcatagcctcaggctagtgagtttgccaaaaccaaagggggtgaatacttccccaagattcttcctgggaggatggaaacagtgcagcccaggtcccatgggggcagctccatcccagagcatttctgatagttgaactgtaatttctactcttaagtgagatatgaagcattatccttttgttcagttgccccgggcttttgaacagaagagtaaatacagaattgaaaaagataaacactcaaccaaacaatgtgaaaacgggttctgtagtatttgtaaaaaggcccggcccaggaccactgtgagctggaaaagggagaaaggcagtgggaaaagaggtgagccgaagatcaattcgacagacagatggtgtgtatgcccctccctgtttgacttcacacacactcataactttccaaatgaaaccccacagtatagcgcatattttcgatatttttgtgaattccaaaaggaaatcacagggctgttcgaaatattgggggaacactgtgtttctgcatcatctgcatttgctccccaagcaatgtagaggtgtttaaagggccctctgctggctgagtggcaatactacaacaaacttcaaggcaagtttggctgaaaacagttgacaacaaagggcccccatacacttatccctcaaattttaagtgatatgaaatacttgtcatgtctttggccaaatcagaagatattcatcctgcttcaagtcagcttcagaaatgttttaaaagggactttagctctggaactcaaaatcaatttattaagagccatattctttaaaaaaaaaaagctggataatattctctgtaatatttcagtcctttacaagccaaatacatgtgtcaatgtttctagtatttcaaagaagcaattatgtaaagttgttcaatgtgacataatagtattataattggttaagtagcttaatgattaggcaaactagatgaaaagattaggggcttccacactgcatagattacacgcacatagccacgcatacacacacagacacacagatgtggggtacactgaacttcaaagcccaaatgaatagaaacacattttctggctagcagaaaaaaacaaaacaaaactgttgtttctctttcttgctttgagagtgtacagtaaaagggattttttcgaattatttttatattattttagctttaattgtgctgtcgttcatgaaacagagctgctctgcttttctgtcagagatggcaagggctttttcagcatctcgtttatgtgtggaatttaaaaagaataaagttttattccattctgtgtgaatggtttgagcagtgaacaaagaatccatgcaaaccaagtcatgactggaagaaatggggagtgggggacagtgcaggggaggaaagctgttacatctatgttaaatgattgtgagcagtctataatgtcttgatgttggttcataggtgagacacaactgatggaggaatgtattataaattatgcaaaatctgacatgagctgaaaagacaggtccttttataagagctaatagatgcttaggatgcaaatgttattttgagcttcgcaaatacatgataccgtgcaataagccttttttccttata

SEQ ID NO: 241 - DNA, 2873 bp, Homo sapiens
  solute carrier family 1 (neutral amino acid transporter), member 5 transcript variant 1 (SLC1A5), neutral amino acid transporter B(0), RD114/simian type D retrovirus receptor, sodium-dependent neutral amino acid transporter type 2, AAAT, ASCT2, M7VS1, RDRC
  CDS (621)...(2246): SLC1A5
cggcacgcccgggaggctttctctggctggtaaccgctactcccggacaccagaccaccgccttccgtacacaggggcccgcatcccaccctcccggacctaagagcctgggtcccctgtttccggaggtccgcttcccggcccccagattctggcatcccagccctcagtgtccaagacccaggcagcccgggtccccgcctcccggatccaggcgtccgggatctgcgccaccagaacctagcctcctgcagacctccgccatctgggggcactcaacctcctggagccaagggccccacgtcccacccagagaaactctcgtattcccagctcctagggccaaggaacccgggcgctccgaactcccagctttcggacatctggcacacggggcagagcagagaagcctcagcgcccagcctggggaatttaaacactccagcttccaagagccaaggaacttcagtgctgtgaactcacaactctaaggagccctccaaagttccagtctccaggtgctgttactcaactcagtcctaggaacgtcgggtcctgggaaggagcccaagcgctcccagccagcttccaggcgctaagaaaccccggtgcttcccatcatggtggccgatcctcctcgagactccaaggggctcgcagcggcggagcccaccgccaacgggggcctggcgctggcctccatcgaggaccaaggcgcggcagcaggcggctactgcggttcccgggaccaggtgcgccgctgccttcgagccaacctgcttgtgctgctgacagtggtggccgtggtggccggcgtggcgctgggactgggggtgtcgggggccgggggtgcgctggcgttgggcccggagcgcttgagcgccttcgtcttcccgggcgagctgctgctgcgtctgctgcggatgatcatcttgccgctggtggtgtgcagcttgatcggcggcgccgccagcctggaccccggcgcgctcggccgtctgggcgcctgggcgctgctctttttcctggtcaccacgctgctggcgtcggcgctcggagtgggcttggcgctggctctgcagccgggcgccgcctccgccgccatcaacgcctccgtgggagccgcgggcagtgccgaaaatgcccccagcaaggaggtgctcgattcgttcctggatcttgcgagaaatatcttcccttccaacctggtgtcagcagcctttcgctcatactctaccacctatgaagagaggaatatcaccggaaccagggtgaaggtgcccgtggggcaggaggtggaggggatgaacatcctgggcttggtagtgtttgccatcgtctttggtgtggcgctgcggaagctggggcctgaaggggagctgcttatccgcttcttcaactccttcaatgaggccaccatggttctggtctcctggatcatgtggtacgcccctgtgggcatcatgttcctggtggctggcaagatcgtggagatggaggatgtgggtttactctttgcccgccttggcaagtacattctgtgctgcctgctgggtcacgccatccatgggctcctggtactgcccctcatctacttcctcttcacccgcaaaaacccctaccgcttcctgtggggcatcgtgacgccgctggccactgcctttgggacctcttccagttccgccacgctgccgctgatgatgaagtgcgtggaggagaataatggcgtggccaagcacatcagccgtttcatcctgcccatcggcgccaccgtcaacatggacggtgccgcgctcttccagtgcgtggccgcagtgttcattgcacagctcagccagcagtccttggacttcgtaaagatcatcaccatcctggtcacggccacagcgtccagcgtgggggcagcgggcatccctgctggaggtgtcctcactctggccatcatcctcgaagcagtcaacctcccggtcgaccatatctccttgatcctggctgtggactggctagtcgaccggtcctgtaccgtcctcaatgtagaaggtgacgctctgggggcaggactcctccaaaattacgtggaccgtacggagtcgagaagcacagagcctgagttgatacaagtgaagagtgagctgcccctggatccgctgccagtccccactgaggaaggaaaccccctcctcaaacactatcgggggcccgcaggggatgccacggtcgcctctgagaaggaatcagtcatgtaaaccccgggagggaccttccctgccctgctgggggtgctctttggacactggattatgaggaatggataaatggatgagctagggctctgggggtctgcctgcacactctggggagccaggggccccagcaccctccaggacaggagatctgggatgcctggctgctggagtacatgtgttcacaagggttactcctcaaaacccccagttctcactcatgtccccaactcaaggctagaaaacagcaagatggagaaataatgttctgctgcgtccccaccgtgacctgcctggcctcccctgtctcagggagcaggtcacaggtcaccatggggaattctagcccccactggggggatgttacaacaccatgctggttattttggcggctgtagttgtggggggatgtgtgtgtgcacgtgtgtgtgtgtgtgtgtgtgtgtgtgtgtgtgtgtgttctgtgacctcctgtccccatggtacgtcccaccctgtccccagatcccctattccctccacaataacagaaacactcccagggactctggggagaggctgaggacaaatacctgctgtcactccagaggacattttttttagcaataaaattgagtgtcaactatttaa

SEQ ID NO: 242 - DNA, 4567 bp, Homo sapiens
  carbohydrate synthase 1, chondroitin sulfate synthase 1 (CHSY1, CHSY, ChSy-1, CSS1), chondroitin glucuronyltransferase II, glucuronosyl-N-acetylgalactosaminyl-proteoglycan 4-beta-N-acetylgalactosaminyltransferase 1, TPBS
  CDS (477)...(2885): CHSY1
ggcgagctaagccggaggatgtgcagctgcggcggcggcgccggctacgaagaggacggggacaggcgccgtgcgaaccgagcccagccagccggaggacgcgggcagggcgggacgggagcccggactcgtctgccgccgccgtcgtcgccgtcgtgccggccccgcgtccccgcgcgcgagcgggaggagccgccgccacctcgcgcccgagccgccgctagcgcgcgccgggcatggtcccctcttaaaggcgcaggccgcggcggcgggggcgggcgtgcggaacaaagcgccggcgcggggcctgcgggcggctcgggggccgcgatgggcgcggcgggcccgcggcggcggcggcgctgcccgggccgggcctcgcggcgctagggcgggctggcctccgcgggcgggggcagcgggctgagggcgcgcggagcctgcggcggcggcccggcgggcggagcggcgcgggcatggccgcgcgcggccggcgcgcctggctcagcgtgctgctcgggctcgtcctgggcttcgtgctggcctcgcggctcgtcctgccccgggcttccgagctgaagcgagcgggcccacggcgccgcgccagccccgagggctgccggtccgggcaggcggcggcttcccaggccggcggggcgcgcggcgatgcgcgcggggcgcagctctggccgcccggctcggacccagatggcggcccgcgcgacaggaactttctcttcgtgggagtcatgaccgcccagaaatacctgcagactcgggccgtggccgcctacagaacatggtccaagacaattcctgggaaagttcagttcttctcaagtgagggttctgacacatctgtaccaattccagtagtgccactacggggtgtggacgactcctacccgccccagaagaagtccttcatgatgctcaagtacatgcacgaccactacttggacaagtatgaatggtttatgagagcagatgatgacgtgtacatcaaaggagaccgtctggagaacttcctgaggagtttgaacagcagcgagcccctctttcttgggcagacaggcctgggcaccacggaagaaatgggaaaactggccctggagcctggtgagaacttctgcatgggggggcctggcgtgatcatgagccgggaggtgcttcggagaatggtgccgcacattggcaagtgtctccgggagatgtacaccacccatgaggacgtggaggtgggaaggtgtgtccggaggtttgcaggggtgcagtgtgtctggtcttatgagatgcagcagcttttttatgagaattacgagcagaacaaaaaggggtacattagagatctccataacagtaaaattcaccaagctatcacattacaccccaacaaaaacccaccctaccagtacaggctccacagctacatgctgagccgcaagatatccgagctccgccatcgcacaatacagctgcaccgcgaaattgtcctgatgagcaaatacagcaacacagaaattcataaagaggacctccagctgggaatccctccctccttcatgaggtttcagccccgccagcgagaggagattctggaatgggagtttctgactggaaaatacttgtattcggcagttgacggccagccccctcgaagaggaatggactccgcccagagggaagccttggacgacattgtcatgcaggtcatggagatgatcaatgccaacgccaagaccagagggcgcatcattgacttcaaagagatccagtacggctaccgccgggtgaaccccatgtatggggctgagtacatcctggacctgctgcttctgtacaaaaagcacaaagggaagaaaatgacggtccctgtgaggaggcacgcgtatttacagcagactttcagcaaaatccagtttgtggagcatgaggagctggatgcacaagagttggccaagagaatcaatcaggaatctggatccttgtcctttctctcaaactccctgaagaagctcgtcccctttcagctccctgggtcgaagagtgagcacaaagaacccaaagataaaaagataaacatactgattcctttgtctgggcgtttcgacatgtttgtgagatttatgggaaactttgagaagacgtgtcttatccccaatcagaacgtcaagctcgtggttctgcttttcaattctgactccaaccctgacaaggccaaacaagttgaactgatgagagattaccgcattaagtaccctaaagccgacatgcagattttgcctgtgtctggagagttttcaagagccctggccctggaagtaggatcctcccagtttaacaatgaatctttgctcttcttctgcgacgtcgacctcgtgtttactacagaattccttcagcgatgtcgagcaaatacagttctgggccaacaaatatattttccaatcatcttcagccagtatgacccaaagattgtttatagtgggaaagttcccagtgacaaccattttgcctttactcagaaaactggcttctggagaaactatgggtttggcatcacgtgtatttataagggagatcttgtccgagtgggtggctttgatgtttccatccaaggctgggggctggaggatgtggaccttttcaacaaggttgtccaggcaggtttgaagacgtttaggagccaggaagtaggagtagtccacgtccaccatcctgtcttttgtgatcccaatcttgaccccaaacagtacaaaatgtgcttggggtccaaagcatcgacctatgggtccacccagcagctggctgagatgtggctggaaaaaaatgatccaagttacagtaaaagcagcaataataatggctcagtgaggacagcctaatgtccagctttgctggaaaagacgtttttaattatctaatttatttttcaaaaattttttgtatgatcagtttttgaagtccgtatacaaggatatattttacaagtggttttcttacataggactcctttaagattgagctttctgaacaagaaggtgatcagtgtttgcctttgaacacatcttcttgctgaacattatgtagcagacctgcttaactttgacttgaaatgtacctgatgaacaaaacttttttaaaaaaatgttttcttttgagaccctttgctccagtcctatggcagaaaacgtgaacattcctgcaaagtattattgtaacaaaacactgtaactctggtaaatgttctgttgtgattgttaacattccacagattctaccttttgtgttttgttttttttttttacaattgttttaaagccatttcatgttccagttgtaagataaggaaatgtgataatagctgtttcatcattgtcttcaggagagctttccagagttgatcatttcctctcatggtactctgctcagcatggccacgtaggttttttgtttgttttgttttgttctttttttgagacggagtctcactctgttacccaggctggaatgcagtggcgcaatcttggctcactttaacctccacttccctggttcaagcaattcccctgcctttgcctcccgagtagctgggattacaggcacacaccaccacgcccagctagtttttttgtatttttagtagagacggggtttcaccatgcaagcccagctggccacgtaggttttaaagcaaggggcgtgaagaaggcacagtgaggtatgtggctgttctcgtggtagttcattcggcctaaatagacctggcattaaatttcaagaaggatttggcattttctcttcttgacccttctctttaaagggtaaaatattaatgtttagaatgacaaagatgaattattacaataaatctgatgtacacagactgaaacatacacacatacaccctaatcaaaacgttggggaaaaatgtatttggttttgttcctttcatcctgtctgtgttatgtgggtggagatggttttcattctttcattactgttttgttttatcctttgtatctgaaatacctttaatttatttaatatctgttgttcagagctctgccatttcttgagtacctgttagttagtattatttatgtgtatcgggagtgtgtttagtctgttttatttgcagtaaaccgatctccaaagatttccttttggaaacgctttttcccctccttaatttttatattccttactgttttactaaatattaagtgttctttgacaattttggtgctcatgtgttttggggacaaaagtgaaatgaatctgtcattataccagaaagttaaattctcagatcaaatgtgccttaataaatttgttttcatttagatttcaaacagtgatagacttgccattttaatacacgtcattggagggctgcgtatttgtaaatagcctgatgctcatttggaaaaataaaccagtgaacaatatttttctattgtacttttcgaaccattttgtctcattattcctgttttagctgaagaattgtattacatttggagagtaaaaaacttaaacacgattcaaaaaaaaaaaaaaaaaa

SEQ ID NO: 243 - DNA, 1718 bp, Homo sapiens
  interleukin 8 (IL8), small inducible cytokine subfamily B, member 8, tumor necrosis factor-induced gene 1, chemokine (C-X-C motif) ligand 8 (CXCL8), emoctakin, granulocyte chemotactic protein 1, lymphocyte derived neutrophil activating peptide (NAP-1, NAP1)
  CDS (154)...(453): IL8
gagggtgcataagttctctagtagggtgatgatataaaaagccaccggagcactccataaggcacaaactttcagagacagcagagcacacaagcttctaggacaagagccaggaagaaaccaccggaaggaaccatctcactgtgtgtaaacatgacttccaagctggccgtggctctcttggcagccttcctgatttctgcagctctgtgtgaaggtgcagttttgccaaggagtgctaaagaacttagatgtcagtgcataaagacatactccaaacctttccaccccaaatttatcaaagaactgagagtgattgagagtggaccacactgcgccaacacagaaattattgtaaagctttctgatggaagagagctctgtctggaccccaaggaaaactgggtgcagagggttgtggagaagtttttgaagagggctgagaattcataaaaaaattcattctctgtggtatccaagaatcagtgaagatgccagtgaaacttcaagcaaatctacttcaacacttcatgtattgtgtgggtctgttgtagggttgccagatgcaatacaagattcctggttaaatttgaatttcagtaaacaatgaatagtttttcattgtaccatgaaatatccagaacatacttatatgtaaagtattatttatttgaatctacaaaaaacaacaaataatttttaaatataaggattttcctagatattgcacgggagaatatacaaatagcaaaattgaggccaagggccaagagaatatccgaactttaatttcaggaattgaatgggtttgctagaatgtgatatttgaagcatcacataaaaatgatgggacaataaattttgccataaagtcaaatttagctggaaatcctggatttttttctgttaaatctggcaaccctagtctgctagccaggatccacaagtccttgttccactgtgccttggtttctcctttatttctaagtggaaaaagtattagccaccatcttacctcacagtgatgttgtgaggacatgtggaagcactttaagttttttcatcataacataaattattttcaagtgtaacttattaacctatttattatttatgtatttatttaagcatcaaatatttgtgcaagaatttggaaaaatagaagatgaatcattgattgaatagttataaagatgttatagtaaatttattttattttagatattaaatgatgttttattagataaatttcaatcagggtttttagattaaacaaacaaacaattgggtacccagttaaattttcatttcagataaacaacaaataattttttagtataagtacattattgtttatctgaaattttaattgaactaacaatcctagtttgatactcccagtcttgtcattgccagctgtgttggtagtgctgtgttgaattacggaataatgagttagaactattaaaacagccaaaactccacagtcaatattagtaatttcttgctggttgaaacttgtttattatgtacaaatagattcttataatattatttaaatgactgcatttttaaatacaaggctttatatttttaactttaagatgtttttatgtgctctccaaattttttttactgtttctgattgtatggaaatataaaagtaaatatgaaacatttaaaatataatttgttgtcaaagtaaaaaaaaaaaaaaa

SEQ ID NO: 244 - DNA, 2158 bp, Homo sapiens
  FBJ murine osteosarcoma viral (v-fos) oncogene homolog (FOS), cellular oncogene c-fos, activator protein 1 (AP-1), G0/G1 switch regulatory protein 7, p55
  CDS (206)...(1348): FOS
attcataaaacgcttgttataaaagcagtggctgcggcgcctcgtactccaaccgcatctgcagcgagcatctgagaagccaagactgagccggcggccgcggcgcagcgaacgagcagtgaccgtgctcctacccagctctgctccacagcgcccacctgtctccgcccctcggcccctcgcccggctttgcctaaccgccacgatgatgttctcgggcttcaacgcagactacgaggcgtcatcctcccgctgcagcagcgcgtccccggccggggatagcctctcttactaccactcacccgcagactccttctccagcatgggctcgcctgtcaacgcgcaggacttctgcacggacctggccgtctccagtgccaacttcattcccacggtcactgccatctcgaccagtccggacctgcagtggctggtgcagcccgccctcgtctcctccgtggccccatcgcagaccagagcccctcaccctttcggagtccccgccccctccgctggggcttactccagggctggcgttgtgaagaccatgacaggaggccgagcgcagagcattggcaggaggggcaaggtggaacagttatctccagaagaagaagagaaaaggagaatccgaagggaaaggaataagatggctgcagccaaatgccgcaaccggaggagggagctgactgatacactccaagcggagacagaccaactagaagatgagaagtctgctttgcagaccgagattgccaacctgctgaaggagaaggaaaaactagagttcatcctggcagctcaccgacctgcctgcaagatccctgatgacctgggcttcccagaagagatgtctgtggcttcccttgatctgactgggggcctgccagaggttgccaccccggagtctgaggaggccttcaccctgcctctcctcaatgaccctgagcccaagccctcagtggaacctgtcaagagcatcagcagcatggagctgaagaccgagccctttgatgacttcctgttcccagcatcatccaggcccagtggctctgagacagcccgctccgtgccagacatggacctatctgggtccttctatgcagcagactgggagcctctgcacagtggctccctggggatggggcccatggccacagagctggagcccctgtgcactccggtggtcacctgtactcccagctgcactgcttacacgtcttccttcgtcttcacctaccccgaggctgactccttccccagctgtgcagctgcccaccgcaagggcagcagcagcaatgagccttcctctgactcgctcagctcacccacgctgctggccctgtgagggggcagggaaggggaggcagccggcacccacaagtgccactgcccgagctggtgcattacagagaggagaaacacatcttccctagagggttcctgtagacctagggaggaccttatctgtgcgtgaaacacaccaggctgtgggcctcaaggacttgaaagcatccatgtgtggactcaagtccttacctcttccggagatgtagcaaaacgcatggagtgtgtattgttcccagtgacacttcagagagctggtagttagtagcatgttgagccaggcctgggtctgtgtctcttttctctttctccttagtcttctcatagcattaactaatctattgggttcattattggaattaacctggtgctggatattttcaaattgtatctagtgcagctgattttaacaataactactgtgttcctggcaatagtgtgttctgattagaaatgaccaatattatactaagaaaagatacgactttattttctggtagatagaaataaatagctatatccatgtactgtagtttttcttcaacatcaatgttcattgtaatgttactgatcatgcattgttgaggtggtctgaatgttctgacattaacagttttccatgaaaacgttttattgtgtttttaatttatttattaagatggattctcagatatttatatttttattttatttttttctaccttgaggtcttttgacatgtggaaagtgaatttgaatgaaaaatttaagcattgtttgcttattgttccaagacattgtcaataaaagcatttaagttgaatgcgaccaa

SEQ ID NO: 245 - DNA, 4814 bp, Homo sapiens
  UDP-Gal:betaGlcNAc beta 1,4- galactosyltransferase, polypeptide 6, UDP-galactose:beta-N-acetylglucosamine beta-1,4-galactosyl transferase 6 (B4GALT6, B4Gal-T6, beta4Gal-T6, beta4GalT-VI), UDP-Gal:glucosylceramide beta-1,4-galactosyltransferase
  CDS (298)...(1446): B4GALT6
ccggctttcttccgtcctgccgtccccgggcccctagcccccagtcccctctcccccctccacctcttgtccctcggcctccgcgcctcccctcccccgactctctggcctcccattcattccgtccgctccctcccatttcctcttttccgctcgggccctctccccagagcctccccgcgcggaccccgctgcagtctcggggttctcagcacatttatggaagtttagggcctggacagtggccccgagtccggcctgagagcgcagcctgggctgctggcagggaagaggaagatgtctgtgctcaggcggatgatgcgggtttccaatcgctctctcctcgccttcatcttcttcttctccctctcttcgtcctgtctgtacttcatctatgtggccccaggcatcgccaacacatatctctttatggtacaagctcgaggtataatgttgagagaaaatgtgaaaacaataggtcatatgatcaggctgtacacaaataaaaacagtacgctcaacggtacagattatcccgaaggcaataattcaagtgattatcttgttcaaacaacaacgtatctcccggaaaacttcacatactcaccatacctcccctgtccagaaaagctgccttatatgcgaggattcctcaatgtcaatgtaagcgaagtcagttttgatgaaattcatcaactcttctccaaggatttagatattgagccagggggtcattggaggccaaaagactgtaaacccagatggaaggtggcagttctcattcctttccgtaatcgccatgaacatcttccaatttttttcttacatctgattccaatgctccagaagcagcggctggaatttgcgttttatgtcattgaacagactggcacacaaccttttaaccgtgcgatgcttttcaatgtgggcttcaaagaggccatgaaagacagtgtctgggactgtgtaatcttccacgatgtggatcatctacctgaaaatgaccggaactattacggatgtggagaaatgccacgtcattttgctgcaaagctggataaatacatgtatattcttccatataaagaattttttggtggtgtaagtgggctgacagtggaacaatttagaaagatcaatggttttcctaatgccttctggggatggggaggagaagatgatgacctttggaacagagttcactatgctggatataatgtaaccagaccagagggagacttaggaaaatacaagtcaattcctcatcaccatagaggtgaagtccagtttttaggacggtataaattactaaggtattccaaggagcgtcagtacatcgatggactgaacaatttaatatataggccaaaaatactggttgataggttgtatacaaacatatctgtaaacctcatgccagagttagctccaatcgaagactattaaaagaagtggctgtcgtggcaaggtagaccacaatgctggatcataaacttggagcgcgctcttagtggaggtcagtgattggctgtgtcacagtgcccttttctctgagaagagccagcagtccacagtgtttacagagtgggactatatacagtcacccttctctcacccgtcctccctgctctgagacacacccctgtggcgagcaccgcagaaacgggaagccactacttaagatcggaagttaagagagctccctccgaagagaaaatttttatactaaaatctataatttaattcaagagaatgcttttatttccgtttaaacatattttgtatatatgtgatataaattaatgtgtgcaaattgtttaaaaattagatgtgttgcagttttgcatgtaatcggttatacctttattggacttttatagacattttttatttgcatgaaaaaaactcactaaatttacatcactaaacaaaggttaacccttgtgtgaaatgaaggaactgtcaataattgacagccaactaatacagtaaactgttatactagttttgagctttagacctcagccttttgtgtggaagaagtcacagctttcttaggctttaaaggaaaagaaggaaggacttaaatagcttttcttcctaccgggattacctatgtttttccttgcttgcaatctcatctgattttgctagaaatcacaaccatattgtttatgcatattgcatgagtattaccaagaaaaatcttaaaagttgtgatgtgacatgatataaaggatctctttatgttaaatgtctttccatgtacctctggtgtgtcagggattttgtgcctcaaaaaatgtttccaaggttgtgtgtttatactgtgtattttttttaaattcacggtgaacagcacttttattatttccagttcagaagagccaaaaaaaagtatcttcatttaaaaagaaatcaagtcagtttttttaaaagaatgatctatggaagaaaacccaatagtacttataatatacaaatgaattatactattagataagaattaaatattctatttttataaagataaatacttagtagataaaaacaaattttaagtttagttttcagacatagaatttcacttttggaggggacccttgaatgttagtttcattcaaactatattttgtttttttcacttttaagagattatatctctggtgttaattactaaaattttctttctaaaagtataatttaatagaattatcttaaaatacatgatcagtattcagtgcgctgatattataatgtcttctatatgtagtatctaaaagcataatttaatagcattgtcttaaaatacgtgatgagttatttggtgcactgatgccataatgtcttctatatgtaatatcttacatgtttgcatgagtgtcagggctttgtccagttatcttcatatgactgttctctgaaaaaaggtcttactacctgatatcaagtacatatcttaattttggatgaatttttccacagtaaagccgaacagtattcttttttgaaaattagcaattataaagattgtttaaaatatcttgatattttcacaaattttaaacaaaaaattaaatatctataaagtgaatgttcaacaacaatgatgagcaatagaaatctatatatgagaaacgtttggataatatttgcctcaaggattgtttacctaaaacagaactatggttatttatctcagattgtaagttttattttgaagtgtcatttttatggcaatattgataacacaaatgaccacaaactaaatcataaaataattgaatccttacactttgagaaaatggatagcttctgtgttatgataccaaacaaaatattttcatatttatttcttagaactatttccaaaatatttatatttcagtttttttatggtactcgaaaaatcaaaccttctgaaaattatgatatttgtacttcatttgtgtattagttcattttctgtttctattacatagtttttaaagtcaatgaaagagattgagaatgttaacatttgttgatcaatgtggagctgtccacattcggtatcttttcatttttatatatattttacagtttcaagaaaacttagtactactagtatctgccttattttcttaagtctgatgttaatttttgtttcaggagtgagatataaacattttgctttttttcagttttgaaatatagtttgtcatcctgtgaaaaccacctcgtttgctttttgtttgtttgttttgcttttttagtgtagacctaaaattatttttgcctataaacagtgaacttaatatgtttctgtgagagtgacagagctgtgcccgtttatcttcattgtattaattattacataaagattaacaaatacattgcaaatgcaaattataggatgtttggaggatttattaatgagcatgtattgattgcctattccatatccagtgcaatgctaggtatgtctatggaaggagtattattacttcatttctaaacaaatgaagtcaagcaaattgagatctttctgaaattatgaagacatcttctgataacttatctgttgtatttcctagtctcaaagtcaagaaacccgtatatgtggacctagggctaataggaggtccctatggcactaactgggaaaattacatggtgcttttcaactacagaaagaagtaatgactaatgggcctgtctgtagagaagaaaaggagaagagtacacatttgctggaactatatataattcacagtggagatagttaattctttgctaaaactagggttttatgagtattttttaaatctacatttaagtttttgtttttgtgaaaagttattcagtaagaaaactttataatattaagtagatacagttatgtattaaaaatttccttatatacccttttgccagccaagatactgatattttaaaacaaaatggaaaaatgtccaatacaatattctctttctggaggcttcctacaagtgaaagcagattttgtcattttatttggcctttgcttgtctttgatatatttctttatgtgtttttcaaatacatactgttgtagatttattgtcttgtatttgcaagtatgccggttgagagaactaaaatggttatagtattgtttatcagaaagaggaagtgtacttaagattattttatttatttagatgaaaggcttctacataaatgcactgaaataaatgctagtaatttcttgtatcccacttctttttttgcttctcatggaaatgtttgtacttttttatcattgtcttttatgaaatataatgttctaaaga

SEQ ID NO: 246 - DNA, 4304 bp, Homo sapiens
  cyclin D1 (CCND1), PRAD1 oncogene, parathyroid adenomatosis 1 (PRAD1), B-cell CLL/lymphoma 1, BCL-1 oncogene, B-cell lymphoma 1 protein (BCL1), D11S287E, U21B31
  CDS (210)...(1097): CCND1
cacacggactacaggggagttttgttgaagttgcaaagtcctggagcctccagagggctgtcggcgcagtagcagcgagcagcagagtccgcacgctccggcgaggggcagaagagcgcgagggagcgcggggcagcagaagcgagagccgagcgcggacccagccaggacccacagccctccccagctgcccaggaagagccccagccatggaacaccagctcctgtgctgcgaagtggaaaccatccgccgcgcgtaccccgatgccaacctcctcaacgaccgggtgctgcgggccatgctgaaggcggaggagacctgcgcgccctcggtgtcctacttcaaatgtgtgcagaaggaggtcctgccgtccatgcggaagatcgtcgccacctggatgctggaggtctgcgaggaacagaagtgcgaggaggaggtcttcccgctggccatgaactacctggaccgcttcctgtcgctggagcccgtgaaaaagagccgcctgcagctgctgggggccacttgcatgttcgtggcctctaagatgaaggagaccatccccctgacggccgagaagctgtgcatctacaccgacaactccatccggcccgaggagctgctgcaaatggagctgctcctggtgaacaagctcaagtggaacctggccgcaatgaccccgcacgatttcattgaacacttcctctccaaaatgccagaggcggaggagaacaaacagatcatccgcaaacacgcgcagaccttcgttgccctctgtgccacagatgtgaagttcatttccaatccgccctccatggtggcagcggggagcgtggtggccgcagtgcaaggcctgaacctgaggagccccaacaacttcctgtcctactaccgcctcacacgcttcctctccagagtgatcaagtgtgacccggactgcctccgggcctgccaggagcagatcgaagccctgctggagtcaagcctgcgccaggcccagcagaacatggaccccaaggccgccgaggaggaggaagaggaggaggaggaggtggacctggcttgcacacccaccgacgtgcgggacgtggacatctgagggcgccaggcaggcgggcgccaccgccacccgcagcgagggcggagccggccccaggtgctcccctgacagtccctcctctccggagcattttgataccagaagggaaagcttcattctccttgttgttggttgttttttcctttgctctttcccccttccatctctgacttaagcaaaagaaaaagattacccaaaaactgtctttaaaagagagagagagaaaaaaaaaatagtatttgcataaccctgagcggtgggggaggagggttgtgctacagatgatagaggattttataccccaataatcaactcgtttttatattaatgtacttgtttctctgttgtaagaataggcattaacacaaaggaggcgtctcgggagaggattaggttccatcctttacgtgtttaaaaaaaagcataaaaacattttaaaaacatagaaaaattcagcaaaccatttttaaagtagaagagggttttaggtagaaaaacatattcttgtgcttttcctgataaagcacagctgtagtggggttctaggcatctctgtactttgcttgctcatatgcatgtagtcactttataagtcattgtatgttattatattccgtaggtagatgtgtaacctcttcaccttattcatggctgaagtcacctcttggttacagtagcgtagcgtgcccgtgtgcatgtcctttgcgcctgtgaccaccaccccaacaaaccatccagtgacaaaccatccagtggaggtttgtcgggcaccagccagcgtagcagggtcgggaaaggccacctgtcccactcctacgatacgctactataaagagaagacgaaatagtgacataatatattctatttttatactcttcctatttttgtagtgacctgtttatgagatgctggttttctacccaacggccctgcagccagctcacgtccaggttcaacccacagctacttggtttgtgttcttcttcatattctaaaaccattccatttccaagcactttcagtccaataggtgtaggaaatagcgctgtttttgttgtgtgtgcagggagggcagttttctaatggaatggtttgggaatatccatgtacttgtttgcaagcaggactttgaggcaagtgtgggccactgtggtggcagtggaggtggggtgtttgggaggctgcgtgccagtcaagaagaaaaaggtttgcattctcacattgccaggatgataagttcctttccttttctttaaagaagttgaagtttaggaatcctttggtgccaactggtgtttgaaagtagggacctcagaggtttacctagagaacaggtggtttttaagggttatcttagatgtttcacaccggaaggtttttaaacactaaaatatataatttatagttaaggctaaaaagtatatttattgcagaggatgttcataaggccagtatgatttataaatgcaatctccccttgatttaaacacacagatacacacacacacacacacacacacaaaccttctgcctttgatgttacagatttaatacagtttatttttaaagatagatccttttataggtgagaaaaaaacaatctggaagaaaaaaaccacacaaagacattgattcagcctgtttggcgtttcccagagtcatctgattggacaggcatgggtgcaaggaaaattagggtactcaacctaagttcggttccgatgaattcttatcccctgccccttcctttaaaaaacttagtgacaaaatagacaatttgcacatcttggctatgtaattcttgtaatttttatttaggaagtgttgaagggaggtggcaagagtgtggaggctgacgtgtgagggaggacaggcgggaggaggtgtgaggaggaggctcccgaggggaaggggcggtgcccacaccggggacaggccgcagctccattttcttattgcgctgctaccgttgacttccaggcacggtttggaaatattcacatcgcttctgtgtatctctttcacattgtttgctgctattggaggatcagttttttgttttacaatgtcatatactgccatgtactagttttagttttctcttagaacattgtattacagatgccttttttgtagttttttttttttttatgtgatcaattttgacttaatgtgattactgctctattccaaaaaggttgctgtttcacaatacctcatgcttcacttagccatggtggacccagcgggcaggttctgcctgctttggcgggcagacacgcgggcgcgatcccacacaggctggcgggggccggccccgaggccgcgtgcgtgagaaccgcgccggtgtccccagagaccaggctgtgtccctcttctcttccctgcgcctgtgatgctgggcacttcatctgatcgggggcgtagcatcatagtagtttttacagctgtgttattctttgcgtgtagctatggaagttgcataattattattattattattataacaagtgtgtcttacgtgccaccacggcgttgtacctgtaggactctcattcgggatgattggaatagcttctggaatttgttcaagttttgggtatgtttaatctgttatgtactagtgttctgtttgttattgttttgttaattacaccataatgctaatttaaagagactccaaatctcaatgaagccagctcacagtgctgtgtgccccggtcacctagcaagctgccgaaccaaaagaatttgcaccccgctgcgggcccacgtggttggggccctgccctggcagggtcatcctgtgctcggaggccatctcgggcacaggcccaccccgccccacccctccagaacacggctcacgcttacctcaaccatcctggctgcggcgtctgtctgaaccacgcgggggccttgagggacgctttgtctgtcgtgatggggcaagggcacaagtcctggatgttgtgtgtatcgagaggccaaaggctggtggcaagtgcacggggcacagcggagtctgtcctgtgacgcgcaagtctgagggtctgggcggcgggcggctgggtctgtgcatttctggttgcaccgcggcgcttcccagcaccaacatgtaaccggcatgtttccagcagaagacaaaaagacaaacatgaaagtctagaaataaaactggtaaaaccccaaaaaaaaaaaaaaaa

SEQ ID NO: 247 - DNA, 4102 bp, Homo sapiens
  ets variant 5 , ETS translocation variant 5 (ETV5), ets-related molecule; ets-related protein ERM
  CDS (248)...(1780): ETV5
agcctggttggcagctgcggcgcagagtccagccgctggtgcgcggagcggttcaccgtcttcggagcggttcggcccagcctttcgcccaggcgcccaggcccgctgcgcgcgtgcgtgagcgcgcctgcgccgccggggccgctgcaaggggaggagagaggccgcctcaggaggatcccttttcccccagaaattactcaatgctgaaacctctcaaagtggtattagagacgctgaaagcaccatggacgggttttatgatcagcaagtcccttttatggtcccagggaaatctcgatctgaggaatgcagagggcggcctgtgattgacagaaagaggaagtttttggacacagatctggctcacgattctgaagagctatttcaggatctcagtcaacttcaagaggcttggttagctgaagcacaagttcctgatgatgaacagtttgtcccagattttcagtctgataacctggtgcttcatgccccacctccaaccaagatcaaacgggagctgcacagcccctcctctgagctgtcgtcttgtagccatgagcaggctcttggtgctaactatggagaaaagtgcctctacaactattgtgcctatgataggaagcctccctctgggttcaagccattaacccctcctacaacccccctctcacccacccatcagaatcccctatttcccccacctcaggcaactctgcccacctcagggcatgcccctgcagctggcccagttcaaggtgtgggccccgcccccgccccccattcgcttccagagcctggaccacagcagcaaacatttgcggtcccccgaccaccacatcagcccctgcagatgccaaagatgatgcctgaaaaccagtatccatcagaacagagatttcagagacaactgtctgaaccctgccaccccttccctcctcagccaggagttcctggagataatcgccccagttaccatcggcaaatgtcagaacctattgtccctgcagctcccccgccccctcagggattcaaacaagaataccatgacccactctatgaacatggggtcccgggcatgccagggcccccagcacacgggttccagtcaccaatgggaatcaagcaggagcctcgggattactgcgtcgattcagaagtgcctaactgccagtcatcctacatgagagggggttatttctccagcagccatgaaggtttttcatatgaaaaagatccccgattatactttgacgacacttgtgttgtgcctgagagactggaaggcaaagtcaaacaggagcctaccatgtatcgagaggggcccccttaccagaggcgaggttcccttcagctgtggcagttcctggtcacccttcttgatgacccagccaatgcccacttcattgcctggacaggtcgaggcatggagttcaagctgatagaaccggaagaggttgctcggcgctggggcatccagaagaaccggccagccatgaactatgacaagctgagccgctctctccgctattactatgaaaagggcatcatgcagaaggtggctggagagcgatacgtctacaaatttgtctgtgacccagatgccctcttctccatggctttcccggataaccagcgtccgttcctgaaggcagagtccgagtgccacctcagcgaggaggacaccctgccgctgacccactttgaagacagccccgcttacctcctggacatggaccgctgcagcagcctcccctatgccgaaggctttgcttactaagtttctgagtggcggagtggccaaaccctagagctagcagttcccattcaggcaaacaagggcagtggttttgtttgtgtttttggttgttcctaaagcttgccctttgagtattatctggagaacccaagctgtctctggattggcacccttaaagacagatacattggctggggagtgggaacagggaggggcagaaaaccaccaaaaggccagtgcctcaactcttgattctgatgaggtttctgggaagagatcaaaatggagtctccttaccatggacaatacatgcaaagcaatatcttgttcaggttagtacccgcaaaacgggacatagtatgtgacaatctgcatcgatcatggactactaaatgcctttacatagaagggctctgatttgcacaatttgttgaaaaatcacaaacccatagaaaagtaagtaggctaagttggggaggctcaaaccattaagggttaaaaatacatcttaaacattggaaagctcttctagctgaatctgaaatattaccccttgtctagaaaaaggggggcagtcagaacagctgttccccactccgtggttctcaaaatcataaaccatggctactcttgggaaccacccggccatgtggtcgccaagtagagcaagccccctttctcttcccaatcacgtggctgagtgtggatgacttttattttaggagaagggcgattaacacttttgacagtattttgttttgccctgatttgggggattgttttgttttggtggttgttttggaaaaacagtttataaactgatttttgtagttttggtatttaaagcaaaaaaacgaaaaacaaaaaacaaaaacaaaccttttggtaactgtgcactgtgtcctttagccagggccgtgccaacttatgaagacactgcagcttgagaggggctttgctgaggcttccccttggccatgtgaaagcccgccttgttgcctgctttgtgctttctgcaccagacaacctgatggaacatttgcacctgagttgtacatttttgaagtgtgcagggcagcctggacacaagcttagattctctatgtatagttccccgtgttcactaacatgccctctctggaaagcatatgtatataacatgtgtcatgtcctttggaaacctggtcacctggtgaaaacccttgggattcttccctgggcatgactgatgacaatttccatttcatcagtttgttttgttttcctttttctttaaatcttggactttaaaccctacctgtgtgattcagtagggtttgagacttacgtgtgatactgacaggtaagcaacagtgctagcattctagattcctgcctttttttaaaaagaaattattctcattgctgtattatattggaaaagttttaaacaaccaagctaaagctatgtgaaagttgagctcaaagtagaggaaaagttactggtggtaccttgctgcctgctctgctggtagaattctgtgctccccgtgacacttagtacattaagaatgactacactgttcctcgtatgtgaaggaggcagtgctgactccgtgagtgtgagacacgtgctttgaactgcttttctattcatggagcactccatagtctcaaactgtcccccttatgaccaacagcacatttgtgaagaggttcgcagggataaggggtgcactttatagctatggaaacatgagattctcctctattggaagctaattagcccacaaaggtggtaaacctgtagattgggccttaattagcattgtactctaatcaaaggactctttctaaaccatatttatagctttcttaacctacacatagtctatacatagatgcatattttacccccagctggctagagatttatttgttgtaaatgctgtatagatttggttttcctttctttacttaccctggtttggattttttttttttttcttttgaatggatttatgctgtcttagcaatatgacaataatcctctgtagcttgagctacccctcccctgctgtaacttacgtgacctgtgctgtcactgggcataggacagcggcatcacggttgcattcccattggactcatgcacctcccggatggtttttgtttttttcgggggttctttggggtttgtttgtttgcttcttttccagagtgtggaaagtctacagtgcagaaaggcttgaacctgccagctgatttgaaatactttcccctgcgcagggccgtatgcatcctgccaagctgcgttatattctgtactgtgtacaataaagaagtttgcttttcgtttaccaa

SEQ ID NO: 248 - DNA, 2298 bp, Homo sapiens
  ets variant 4 (E1A enhancer-binding protein, E1AF) transcript variant 1 (ETV4), EWS protein/E1A enhancer binding protein chimera, adenovirus E1A enhancer-binding protein, polyomavirus enhancer activator 3 homolog (PEA3, PEAS3)
  CDS (129)...(1583): ETV4
cacgttcttatgtaaccgagcccgggtaaagcagggctgcagaaagcagaaacggcgagcccggctcctgggagcaggtctcggcccccgcttggggccccggccgtgcggccggagggagcggccggatggagcggaggatgaaagccggatacttggaccagcaagtgccctacaccttcagcagcaaatcgcccggaaatgggagcttgcgcgaagcgctgatcggcccgctggggaagctcatggacccgggctccctgccgcccctcgactctgaagatctcttccaggatctaagtcacttccaggagacgtggctcgctgaagctcaggtaccagacagtgatgagcagtttgttcctgatttccattcagaaaacctagctttccacagccccaccaccaggatcaagaaggagccccagagtccccgcacagacccggccctgtcctgcagcaggaagccgccactcccctaccaccatggcgagcagtgcctttactccagtgcctatgacccccccagacaaatcgccatcaagtcccctgcccctggtgcccttggacagtcgcccctacagccctttccccgggcagagcaacggaatttcctgagatcctctggcacctcccagccccaccctggccatgggtacctcggggaacatagctccgtcttccagcagcccctggacatttgccactccttcacatctcagggagggggccgggaacccctcccagccccctaccaacaccagctgtcggagccctgcccaccctatccccagcagagctttaagcaagaataccatgatcccctgtatgaacaggcgggccagccagccgtggaccagggtggggtcaatgggcacaggtacccaggggcgggggtggtgatcaaacaggaacagacggacttcgcctacgactcagatgtcaccgggtgcgcatcaatgtacctccacacagagggcttctctgggccctctccaggtgacggggccatgggctatggctatgagaaacctctgcgaccattcccagatgatgtctgcgttgtccctgagaaatttgaaggagacatcaagcaggaaggggtcggtgcatttcgagaggggccgccctaccagcgccggggtgccctgcagctgtggcaatttctggtggccttgctggatgacccaacaaatgcccatttcattgcctggacgggccggggaatggagttcaagctcattgagcctgaggaggtcgccaggctctggggcatccagaagaaccggccagccatgaattacgacaagctgagccgctcgctccgatactattatgagaaaggcatcatgcagaaggtggctggtgagcgttacgtgtacaagtttgtgtgtgagcccgaggccctcttctctttggccttcccggacaatcagcgtccagctctcaaggctgagtttgaccggcctgtcagtgaggaggacacagtccctttgtcccacttggatgagagccccgcctacctcccagagctggctggccccgcccagccatttggccccaagggtggctactcttactagcccccagcggctgttccccctgccgcaggtgggtgctgccctgtgtacatataaatgaatctggtgttggggaaaccttcatctgaaacccacagatgtctctggggcagatccccactgtcctaccagttgccctagcccagactctgagctgctcaccggagtcattgggaaggaaaagtggagaaatggcaagtctagagtctcagaaactcccctgggggtttcacctgggccctggaggaattcagctcagcttcttcctaggtccaagccccccacaccttttccccaaccacagagaacaagagtttgttctgttctgggggacagagaaggcgcttcccaacttcatactggcaggagggtgaggaggttcactgagctccccagatctcccactgcggggagacagaagcctggactctgccccacgctgtggccctggagggtcccggtttgtcagttcttggtgctctgtgttcccagaggcaggcggaggttgaagaaaggaacctgggatgaggggtgctgggtataagcagagagggatgggttcctgctccaagggaccctttgcctttcttctgccctttcctaggcccaggcctgggtttgtacttccacctccaccacatctgccagaccttaataaaggcccccacttctcccattaaaaaaaaaaaaaaaaaaaaaaaaaaaaaaaaaaaaaaaa

SEQ ID NO: 249 - DNA, 7767 bp, Homo sapiens
  solute carrier family 4, sodium bicarbonate cotransporter, member 7 transcript variant 1 (SLC4A7), sodium bicarbonate cotransporter 2b (SBC2), electroneutral Na/HCO(3) cotransporter, NBC2, NBC3, NBCN1, SLC4A6
  CDS (72)...(3716): SLC4A7
ctcactgtccctggaatcttcaagggagttactgcattacatcatcagaaacaaggcatttctatattactatggaaagatttcgtctggagaagaagttacctggtcctgatgaagaagctgttgtggatcttggcaaaactagctcaactgtgaacaccaagtttgaaaaagaagaactagaaagtcatagagctgtatatattggtgttcacgtcccgtttagtaaagagagtcgtcggcgtcataggcatcgcggacacaaacatcaccaccggagaagaaaagataaagaatcagataaagaagatggacgggaatctccttcttatgatacaccatcccagagagttcagtttatccttggtactgaagatgatgatgaagaacatattccccatgatctcttcacggaaatggatgaactgtgttacagagatggagaagaatatgaatggaaagaaactgctagatggctgaaatttgaagaggatgttgaagatggcggtgaccgatggagtaaaccttatgtggcaactctctctttgcacagtctttttgaactaaggagttgcatcctcaatggaacagtcatgctggatatgagagcaagcactctagatgaaatagcagatatggtattagacaacatgatagcttctggccaattagacgagtccatacgagagaatgtcagagaagctcttctgaagagacatcatcatcagaatgagaaaagattcaccagtcggattcctcttgttcgatcttttgcagatataggcaagaaacattctgaccctcacttgcttgaaaggaatggggaaggcctttcagcctcccgccactctttgcgaacaggtctgtctgcctcaaacctttccttgagaggagaatcacctttatctcttcttcttggtcatcttcttccttcttcaagagctggaacccctgcaggctcaaggtgtacaaccccagtacccacccctcaaaacagtcctccttctagccctagcatcagccgcctgacctccagaagttcccaagagagtcagcgtcaggccccagaactactggtttcacctgccagtgatgatattcccacagtagtaattcatccgcctgaggaagacttagaagcagcgctgaaaggcgaggagcagaagaatgaggaaaatgttgacttaactccaggtattttggcctctccccagtctgctcctggaaacttggacaatagtaaaagtggagaaattaaaggtaatggaagtggtggaagcagagaaaatagtactgttgacttcagcaaggttgatatgaatttcatgagaaaaattcctacgggtgctgaggcatccaacgtcctggtgggcgaagtagactttttggaaaggccaataattgcatttgtgagactggctcctgctgtcctccttacagggttgactgaggtccctgttccaaccaggtttttgtttttgttattgggtccagcgggcaaggcaccacagtaccatgaaattggacgatcaatagccactctcatgacagatgagattttccatgatgtagcttataaagcaaaagacagaaatgacctcttatctggaattgatgaatttttagatcaagtaactgtcctacctccaggagagtgggatccttctatacgcatagaaccaccaaaaagtgtcccttctcaggaaaagagaaagattcctgtgtttcacaatggatctacccccacactgggtgagactcctaaagaggccgctcatcatgctgggcctgagctacagaggactggacggctttttggtggtttgatacttgacatcaaaaggaaagcaccttttttcttgagtgacttcaaggatgcattaagcctgcagtgcctggcctcgattcttttcctatactgtgcctgtatgtctcctgtaatcacttttggagggctgcttggagaagctacagaaggcagaataagtgcaatagagtctctttttggagcatcattaactgggattgcctattcattgtttgctgggcaacctctaacaatattggggagcacaggtccagttctagtgtttgaaaaaattttatataaattctgcagagattatcaactttcttatctgtctttaagaaccagtattggtctgtggacttcttttttgtgcattgttttggttgcaacagatgcaagcagccttgtgtgttatattactcgatttacagaagaggcttttgcagcccttatttgcatcatattcatctacgaggctttggagaagctctttgatttaggagaaacatatgcatttaatatgcacaacaacttagataaactgaccagctactcatgtgtatgtactgaacctccaaaccccagcaatgaaactctagcacaatggaagaaagataatataacagcacacaatatttcctggagaaatcttactgtttctgaatgtaaaaaacttcgtggtgtattcttggggtcagcttgtggtcatcatggaccttatattccagatgtgctcttttggtgtgtcatcttgtttttcacaacattttttctgtcttcattcctcaagcaatttaagaccaagcgttactttcctaccaaggtgcgatcgacaatcagtgattttgctgtatttctcacaatagtaataatggttacaattgactaccttgtaggagttccatctcctaaacttcatgttcctgaaaaatttgagcctactcatccagagagagggtggatcataagcccactgggagataatccttggtggaccttattaatagctgctattcctgctttgctttgtaccattctcatctttatggatcaacaaatcacagctgtaattataaacagaaaggaacacaaattgaagaaaggagctggctatcaccttgatttgctcatggttggcgttatgttgggagtttgctctgtcatgggacttccatggtttgtggctgcaacagtgttgtcaataagtcatgtcaacagcttaaaagttgaatctgaatgttctgctccaggggaacaacccaagtttttgggaattcgtgaacagcgggttacagggctaatgatttttattctaatgggcctctctgtgttcatgacttcagtcctaaagtttattccaatgcctgttctgtatggtgttttcctttatatgggagtttcctcattaaaaggaatccagttatttgaccgtataaaattatttggaatgcctgctaagcatcagcctgatttgatatacctccgttatgtgccgctctggaaggtccatattttcacagtcattcagcttacttgtttggtccttttatgggtgataaaagtttcagctgctgcagtggtttttcccatgatggttcttgcattagtgtttgtgcgcaaactcatggacctgtgtttcacgaagagagaacttagttggcttgatgatcttatgccagaaagtaagaaaaagaaagaagatgacaaaaagaaaaaagagaaagaggaagctgaacggatgcttcaagatgatgatgatactgtgcaccttccatttgaagggggaagtctcttgcaaattccagtcaaggccctaaaatatagtcctgataaacctgtgagtgtgaaaataagttttgaagatgaaccaagaaagaaatacgtggatgctgaaacttcattatagaattgaaccaagaggcattatacatatagatatatacatatgtaatgtgtgcgtatcatgtcactatatataagaatattgtatgtcatgctgtttatgtgtgactaccgggtttttaaaagtagtgtctggagtttgtaatgagcaccgtggagactatgtatttaatgaaatgctctctttgaagtgaggtacatggttcttaactattcaaatatttattctgttagaaaaaaaaattttctgttttgcaatagaaggatgtggagaaatgctttcagtctacttttcttaaatctctgttcatcagtggcaattcgtaaaaaccttaagtgatactttgtttatatgtttataatttttaggtgtttcctgaaattttcacatattatttcacttttgttagtgctttatgggaagaatagggagtctataccagtgctgtgggaaaaatggtaacatttcagggcttctctatttgtgtttcatttctgtagatgtccatcgtgtttcactaactggcgttttcttagccatagagatgactgtagaacaatagaaactttaataatgatagtttttaacttttatgtttaaattttttttaaatcttaaaaccttcatatctaggtatccattgtgacagacaagtaaaattgcaggtgatttgataattaagcacccataccatttataacttctgaatttaaaaagttatacaatgccagtttgcaatagttgattttgatgcctttgtagaatattttttctgaatccttatgctcttttaaagccaatgattcccactctgttctctgccttgtctctctttgtcttaaaatgctttagtttccatcaggttcaagttcttgactattattctcttataagtagtaggcgtaaataatcaggagttagaattctctcagaagggtctatgatcagtattactttattaagaattacctttcattttctctttatgttattctttcacttttgtagattacatttaatagcttgttacctgtgattttattttaaaatatttattttgatatgatgcttaaatattatataaacatttggaaaagtaacaaatagagtaaattgttaatgtaaatagttggtgcttactttcatttatgtttattatcttaaagcaattgatagattttacatctttgatataaagcactgccatatttatattttaaaaggaaattagacattttatatgtagctcagattaatgacatttttattttgtgtattagtttttgcttttctgagctttttaaagtctaacaaatctttttagtcatcttttatatacttttagttccacatgaaataaatgttgttaagcctgtaggactggatgaatggggttgtgaaactgatttgacaagagaataatttacaaaaatcaaatgagtattgagaagccacagaaatatcaaaaatggtgacatcactattaggatgaaaattttatgaaattccaatgctccctttaaccatataattaaattacaaaggtatacataattaatctaataaaggatcatgaggaatgccaaaagctgaaattttagcaagtctggtgttttaaattcattataaactatttattaactaatgtaatgtcctcctctaagaccatattgtaagagtcttgttaaaatgatggattcaacttctgcctcggatgagaggttggaaatgtagctgcttttctttagaaaatatgtagctgtcatcatttggtactgcctaaaaagagttagactctattggcaattgatagagtattacccacggtgcttattattgtttatgagcttccattgtaatgattcctttttatttgtagcagcataattatttccaaagaccccagtatttgctgctatttttaaaactcccctgatgtacctgaacaagaggatttcctcacatcatttccttgtgtctggacatcaggggtaacaactgtacttactttacaggaagaaattttaaaactgaaaactacctgggatcatagtgtttctgtgattttatttaattgtgtatagtaattatccagtgccagaaaaaccgtcacttgcaaaatactttgcactcaaaatgtttttacaatgcttctaaatgttactggtttctgctttcttttgactacttgactgacaaaatgatctgactactccatttaagagcaaaggtaactcatgtttaggtaattaactgcttgttttaagtgattatatttcttccactgtttttgaaaaataatcaaagatagcattcattgagagacagtgacagatataatttactacatatattgatttttaaataaagttgccttaaataagtgtatgtaagcagtagtagttgctatgtactgatttacctcaaggtgcaaaataattaaacctgtacatattccatttacaaaataaattcagccctgcactttctttagatgccttgatttccagaatggagcttagtgctactgaataccctggccacagagccacctcaggatattcttttctccaccctagtttatttatttatagatatctgtttacaaagtctgtagtaaatcctgatgctgaccatctgaaatgtactttttttctgaatgctgtttcaatctaaaatagcagcttttgagaaaacaatgatgtaaattccttatgataaaaggatgattctatatattctttaatgatattaaatatgccgaagccaagcacacagtctttctaaagtgtgtgtatgtttgtgtgaatgtgaatgatactgatcttatatctgttaaaagttgttttaaaaagctgtggcatcccattgttcatatttgccaagtcttctgtaaagatgtctaggacgaaatattttatgtgctaatgcatgtatttgtaaaccagatttgtttaccactcaaaattaacttgttttcttcatccaaaaaagtttatttcttccacgtacttaaattttctgtgtgggtataatatagctttctaatttttttctttcacaaaggcaggttcaaaattctgttgaaagaaaaatgctttctgaaactgaggtataacaccagagcttgctgtttaaaggattatatgatgtacatcagttctataaatgtgctcagcagtttaacatgtgaatcctgttttaaagtgctcagatttcaactgtgtaagccattgatataacgctgtaattaaaaatgtttatatgaaataacttaatgttttaaatttatttatgtagatcacatcatttttatcgtatgcagtgcaaatatgtgaaatgtcttttggtttattccaacaattatttattttagaaagtaagtttaaagactttaaggacattcaaagtttaaaatagtgttcaaattgcaaaatttggcaatcttcatataaattggtttcttttctaacttttcaaaaactaacattaaatgtcaattataggaaaacatagttggaaatgtaatcatccaaagatcatttttaaaatgaaatttaattagcacatattgaacatttgacttaattgttaaaccccagttttgttttgtttttttaatcagatttttgcacactgattagtttttgtgttgtggcttttgttgctttattattcaaggttttttttttttttcttccccatgggggagattgtcttccaatgtttaactacgtttaaataaataaaaattgaattttattgttcatttatataaaatctgataccttgatgtaatttcacaatacagttccaatttttatggcttttataattacaatgatattttcttctataataaaatccaaagtaaacatttaaattgtagaactgatatttttcatttatatgaagtataagcctctactgggtctatattgtgaatcatcctgcctttcaaatttgtttcataattgttagatgaaaactatttttttggagatgttactgaagttgattgagcaataaaagtctacttaattagtaaaaaaaa

SEQ ID NO: 250 - DNA, 6824 bp, Homo sapiens
  ets variant 1 transcript variant 1 (ETV1), ETS translocation variant 1; ets-related protein 81 (ER81)
  CDS (740)...(2173): ETV1
aaggaaaccagcccaatagtggacctaacaccccaataatgggaactggcgactcgaaacacacggtttcagtatccccaggcgccttaacaataagcagcgggttacagaggaaatcgagtctctccgtggcgcttccaggctgaggacccagcgcctaccggccgagcaccccctagggcagaggggcgagggagacccgcgggaaggggcagcaagccgcctgattgacagcccgaaatctgatcttgtgaaagagacgcggagccaatgggaggcagcgatccatcagtttggattggaggcccctggaggagaagtagaggaaaaaccaccgaattgagctctgtcagaggcgctttcggcttccaagggggaagtgctgggctataattaatgtttttattaaatttggagggaagtttttgcagcctttcgcctagcgtggccttcagtcccgttaggtgcaaagcaagtctcgttgatcgccattgctagttttgcacacgtttgcgaatcagagctgcccggggtacaccgaccgcgcagggaaacatcgagagtgtaaataaatacatcgcctcttgttcggatttttgctactaccgaaaatatgtaaattgtgaactctgttggctctctttggatccaggttgatagaagtccagatcctgaggaaatctccagctaaatgctcaaaatataaaatactgagctgagatttgcgaagagcagcagcatggatggattttatgaccagcaagtgccttacatggtcaccaatagtcagcgtgggagaaattgtaacgagaaaccaacaaatgtcaggaaaagaaaattcattaacagagatctggctcatgattcagaagaactctttcaagatctaagtcaattacaggaaacatggcttgcagaagctcaggtacctgacaatgatgagcagtttgtaccagactatcaggctgaaagtttggcttttcatggcctgccactgaaaatcaagaaagaaccccacagtccatgttcagaaatcagctctgcctgcagtcaagaacagccctttaaattcagctatggagaaaagtgcctgtacaatgtcagtgcctatgatcagaagccacaagtgggaatgaggccctccaacccccccacaccatccagcacgccagtgtccccactgcatcatgcatctccaaactcaactcatacaccgaaacctgaccgggccttcccagctcacctccctccatcgcagtccataccagatagcagctaccccatggaccacagatttcgccgccagctttctgaaccctgtaactcctttcctcctttgccgacgatgccaagggaaggacgtcctatgtaccaacgccagatgtctgagccaaacatccccttcccaccacaaggctttaagcaggagtaccacgacccagtgtatgaacacaacaccatggttggcagtgcggccagccaaagctttccccctcctctgatgattaaacaggaacccagagattttgcatatgactcagaagtgcctagctgccactccatttatatgaggcaagaaggcttcctggctcatcccagcagaacagaaggctgtatgtttgaaaagggccccaggcagttttatgatgacacctgtgttgtcccagaaaaattcgatggagacatcaaacaagagccaggaatgtatcgggaaggacccacataccaacggcgaggatcacttcagctctggcagtttttggtagctcttctggatgacccttcaaattctcattttattgcctggactggtcgaggcatggaatttaaactgattgagcctgaagaggtggcccgacgttggggcattcagaaaaacaggccagctatgaactatgataaacttagccgttcactccgctattactatgagaaaggaattatgcaaaaggtggctggagagagatatgtctacaagtttgtgtgtgatccagaagcccttttctccatggcctttccagataatcagcgtccactgctgaagacagacatggaacgtcacatcaacgaggaggacacagtgcctctttctcactttgatgagagcatggcctacatgccggaagggggctgctgcaacccccacccctacaacgaaggctacgtgtattaacacaagtgacagtcaagcagggcgtttttgcgcttttccttttttctgcaagatacagagaattgctgaatctttgttttatttctgttgtttgtattttatttttaaataataatacacaaaaaggggcttttcctgttgcattattctatggtctgccatggactgtgcactttatttgagggtgggtgggagtaatctaaacatttattctgtgtaacaggaagctaatgggtgaatgggcagagggatttggggattactttttacttaggcttgggatggggtcctacaagttttgagtatgatgaaactatatcatgtctgtttgatttcataacaacataagataatgtttattttatcggggtatctatggtacagttaatttcacgttgtgtaaatatccacttggagactatttgccttgggcattttcccctgtcatttatgagtctctgcaggtgtacaaaaaaaccccaatctactgtaaatggcagtttaattgttagaaatgactgtttttgcaccacttgtaaaaaggtatttagcgattgcatttgctgtttgttgttttattttgctttatatatgacttgcagaggataaccataaaatgggtaattctctctgaagttgaataatcaccatgactgtaaatgaggggcacaattttggactctggcgccaaactgagtcataggccagtagcattacgtgtatctggtgccaccttgctgtttagatacaaatcataccgtcttttaaatattttgaagcccatttcagttaaataatgacatgtcatggtcctttggaatcttcatttaaatgttaaatctggaatcaaaatgaagcaaaaaatatctgtctccttttcactttcttcagtacataaatacattatttaatcaataagaattaactgtactaaatcatgtattatgctgttctagttacagcaaacactctttaagaaaaatatccaatacactaaataggtactatagtaatttttagacatggtacccattgatatgcatttaaaccttttactgctgtgttatgttgataacatatataaatattagataatgctaatgcttctgctgctgtcttttctgtaatattctctttcatgctgaatttactatgaccatttataagcagtgcagttaactacagatagcatttcaggacaaaatagatgactcaaaccatttattgcttaaaaaatagcttacgccatgctatgctataagcagcttttatgcacattgacaaatgaagagtaagcttcagcttgctaaaggaaactgtggaaccttttgtaacttttggtgatatggaaaattatttacaaaccgtcaaagaatatgaggaagttgctgtatgacatagtgctggcactgatattatccatcatctctttttggacacttctgtaaatgtgattggattgtttgaaagaagatttaaagtttcaaagttttttgttctgtttttgctttgcatttggagaaaatattgaaagcagggtatgttgtttcattcaccttgaaaaaaccatgagtaaatggggatatagaatctctgaatagctcgctaaaagattcaagcaagggacatgaattttgttccatctatcaataatatccagaagaacaacttttttaaagagtctatagcaaaaagcaaaaaaaaaaaaaaattctaaacacaaagtcaaaataaacctattgtaaaagcatttcgtgatgagcatgaaaaagattgtttaaagatgatccccccagctacccattttccaaaactacacagatcacagctcatttctctaagtggagcagttatcaagaaacccaaacaccaaaattgctactcttcacatttaatcctacaaaaagtactccaatttcaaaatatgtatgtaacctgcgatttcaatgattgttgttcatatacatcatgtattattttggcccattttgggcctaaaaaagaaaactatgccttaaaaatcagaaccttttctccccactatgcttatgtggccatctacagcacttagaataaaaacagatgttaaaatattcagtgaaagttttattggaaaaaggaattgagatatataattgagatttggtgaaattgaaggagaaaatttaagtgagtctttaaaatatattctgaatgaaaactgtattgaggattcatttttgttccttttttttctttttctcttttctcctttttcttctttttaatagtctagttttagtcagtcagtgaggaagaattgggccatgctaacgttatcacaagagaacaatggcagaaatggtattagttatataatatttaaggacaaactatatgttttgctgttttaacgtagtgactcactgaactaaatacataattgaccaacattaagtgtatttccaatacagaagggttgaaaatattacattataaactcttttgaaaaatgtatctaaaattttttaagttctgttttgattccactttttggttgagtttttatgtttttgttttcaggtagattaataaatctggcagctgatttctgcaagattcttgtgttttgaatttctcattgaattggctactcaaacatagaaatcatttgttaatgatgtaatgtcttctctcagcttttatcttcactgctgtttgctgtctcttgatgatgacatgttaatacccaatagattaattgcaacaaacacttatactcaaataactaagtaaaaataatttttcttgttatgtccatgaaaagtgcttcagaataaaaatccacaagactgacagtgcagaacatttttctcaaatcatgggcggatcttggaggtctagtttcccgtagatgctgtaaccaattaccacaacttcagtaatttacacaaatttatcttatagttctggaggcagaagttcaaaagaagccttaagagactaaaaccaagatgtccttaggtctggttccttctggaggctccaggggagattcttccagctttcacttctagagtctgctgacattccttggctcctggctacatcacttcaatctctgcttccatggtcacatactcttctactatagtcaaatttccttcctgcctcttataaggatgcttgtgattacatttaggggatgctcagataatccaggacaatctctccatctcaagatccttaacttaatgacgtgtgccaagtccctttggctagataattattcataggtcccagggattaggacatggatgtaaggggtgagggcagggctgttattcagaacaccgcacggaggaggaagactgtgtagcaaagactctaattgatttactcaggaacagtggagttctgctgagggatctaggatttgaaagtactagagtttgcttttatttaccactgagatattttccccttattctgcataaataattttgaaaactttctatattaaatttcaactattccactaaaatgtctggtaatcacatcaagcctttagattattcaaatccttccccagcccccaggaaaacactaagtcatgaaacagaaaaacagaaggtatgataataatagtaataacagttaaatcagtggtctaatccagattttattttttaatacatttcttttggtgttaatatgggttactatgtgatcttatcatttgctagtgattattacttattaggtaagaacaatgtgtaaaatatgtctattactcaaaagaacaattgcaaaatgagtcaacttatctttatataaccaggaaagaaatatattgccagaagctacagaattttgccagatgatagggatttctaaaatgagccactttgtctatcatgcagccttttcagagcttgtaatgagaaaacattacagaggagaaggtcatttggatgtttgttacttggaatcctagaaaacaaaaactaaaatttaaaaataagaagtgagtaagctattttccatttgcgatttggtatggagaagagaggaaatagaattattaaaaaaatacaaattgggtaaaagtgatggtggaaaaaatataaagaaggcaaatgtacatattaagcaattctactaagaattggaaaaatcaagtttcaaaaagatggtaatagttgggcatgatactagaaaatttcacccagtttattcagagctcaactagtacttttaggacttctttttttatatacatgagactcactttgacatacttaaaaaaaaaacagtttatggaaagtacagtttaagaggagaatttgattagactaagtggatatctttatagaaatattaatgatttcagaattttcagttacaagtgtatataccgtggctattgtttatggattcatatgtaaggtagggtcttttttgcatatagactccagtattagttactttcattctaaaattatatttatgcttctatggggaagaaaatttttaattcacttggttgtattaaaattatacttacggtttgagaaaacatgctatgaaaatcatgattatagcaaattaaatatgctcaaaatttaaatctaaaataaaagcccagaaactgaaaaaaaaaaaaaaaaaa

SEQ ID NO: 251 - DNA, 2476 bp, Homo sapiens
  v-maf avian musculoaponeurotic fibrosarcoma oncogene homolog F transcript variant 3 (MAFF, hMafF), transcription factor MAFF, U-MAF
  CDS (339)...(833): MAFF
cgggtcggtgacgtcaccgcatgactgggtttttatgaatgaaaggaatcctgtgagtgagtaattccgggaagctcgccttacaactccgcgcggcctcggccccctgcgccgcccgccccacaacaaaactcagcgcagcgctcccgggcgcccggttcagagcgacctgcggctcagagcggaggggagactgaccggagcgcggatcgggacagcggccgggacagcggcgagacgcgcgtgtgtgagcgcgccggaccaagcgggcccagaagcgggtgaggaacgcgggaccaggaggacggtctgcagcccagagggcaccttctgcaaacatgtctgtggatcccctatccagcaaagctctaaagatcaagcgagagctgagcgagaacacgccgcacctgtcggacgaggcgctgatggggctgtcggtgcgcgagctgaaccggcatctgcgcgggctctccgccgaggaggtgacacggctcaagcagcggcgccgcacactcaaaaaccgtggctacgccgccagctgccgcgtgaagcgcgtgtgccagaaggaggagctgcagaagcagaagtcggagctggagcgcgaggtggacaagctggcgcgcgagaacgccgccatgcgcctggagctcgacgcgctgcgcggcaagtgcgaggcgctgcagggcttcgcgcgctccgtggccgccgcccgcgggcccgccacgctcgtggcgccggccagcgtcatcaccatcgtcaagtccaccccgggctcggggtctggccccgcccacggcccggaccccgcccacggcccggcctcctgctcctagtgcccgcccccgccatgcctcagccacgcccctccggcctcagctccctccccaaagtgcctgagcgccgcctctgtgcccaggtcccatttctctgcagcactggccccttggtgcacacacattcccttcgtgggccctgtcttcctcttgcagccccccaaactgggaccgaatgaccctgggaaggggaacttgggtaggttggggatggggcagaggtctggatctgggatcgcccttggctgaaagtttagcctttttagattgagagatacagagccggcttagagaacagctgttgggggagaagagggcacccctcatcttggaaactgctcttattgtgccaatatgccctccaaaccctcccaggattcaaagctaggtttggctgtctgtgacttacgggaccgtcctgctgagaaattgcactgaagagatgcccccacctctggttgggcctgggggtgcctggccttccgaaactaaaagagtgggtgggaagactagtgaaacccagttcacggatggggaaacaggcctgaggtcacatttcacttagtggttgtgttgggaccaaaacctgggtgtcctcactgctgccctgagtccagccatggttttcagggggacagtggacagggactcagaaatgtggtgggagggcctccctggcttgggagaccgctctctgcaagggagggggagagaagcagagggagagagaaggtgacacggatggaagagtgggaaggagctggcctggctcagccctaggctgtccctgcagccagggtgtccgggggctggccagtcagagaaagggggccatggactgctgtggcaaatagggagacaaggagacagaccctgcagtcctactacagtctggagtggggtcctaagaagaagggtcccacctcaacccctgtcagtgtccactgtggggtgggggctgacccctgcctttgattgtcattctcctgggaagcccagtctcagtccctcccccaacactgtccacactgcccctccccactgtttatttattgcacggatctaagttattctccccagccagagcccgagctcctgctccctgggaaaagtggcgtatggccctgagctgggctttatattttatatctgcaaataaatcacattttatcttatatttagggaaagccggagagcaacaacaaaaaatgtttaagccgggcgcggtggctcacatctgtaatcccagcactttgggagtccaaggagggggatcgcttgagtccaggagtttgagaccagcctggacaacatggtgaaaccccatctctacaaaaaatacaaaaattagccatgcatggtggctcatgcctgtagtcccagctacttgggaggctgaggcaggaggatcacttaagcccagaaggcagaggttgtagtgagctgagatcgcaccactgcactccagcctgggcaacatagcaaaatcctgtctcaaaaaaaaagttaaaaaatattgcccggctcctagaatttatttatttcctgacttacagcaagcgagttatcgtcttctgtattttgtagactttctaaataaagtcaaattctttctttttccacagagaataaaaaaaaaaaaa

SEQ ID NO: 252 - DNA, 1254 bp, Homo sapiens
  immediate early response 3 (IER3), immediate early protein GLY96, radiation-inducible immediate-early gene IEX-1, anti-death protein, differentiation-dependent gene 2 protein (DIF-2, DIF2), PACAP-responsive gene 1 protein (PRG1)
  CDS (33)...(503): IER3
ctcacttggccttacactccgctcggctcaccatgtgtcactctcgcagctgccacccgaccatgaccatcctgcaggccccgaccccggccccctccaccatcccgggaccccggcggggctccggtcctgagatcttcaccttcgaccctctcccggagcccgcagcggcccctgccgggcgccccagcgcctctcgcgggcaccgaaagcgcagccgcagggttctctaccctcgagtggtccggcgccagctgccagtcgaggaaccgaacccagccaaaaggcttctctttctgctgctcaccatcgtcttctgccagatcctgatggctgaagagggtgtgccggcgcccctgcctccagaggacgcccctaacgccgcatccctggcgcccacccctgtgtccgccgtcctcgagccctttaatctgacttcggagccctcggactacgctctggacctcagcactttcctccagcaacacccggccgccttctaactgtgactccccgcactccccaaaaagaatccgaaaaaccacaaagaaacaccaggcgtacctggtgcgcgagagcgtatccccaactgggacttccgaggcaacttgaactcagaacactacagcggagacgccacccggtgcttgaggcgggaccgaggcgcacagagaccgaggcgcatagagaccgaggcacagcccagctggggctaggcccggtgggaaggagagcgtcgttaatttatttcttattgctcctaattaatatttatatgtatttatgtacgtcctcctaggtgatggagatgtgtacgtaatatttattttaacttatgcaagggtgtgagatgttccccctgctgtaaatgcaggtctcttggtatttattgagctttgtgggactggtggaagcaggacacctggaactgcggcaaagtaggagaagaaatggggaggactcgggtgggggaggacgtcccggctgggatgaagtctggtggtgggtcgtaagtttaggaggtgactgcatcctccagcatctcaactccgtctgtctactgtgtgagacttcggcggaccattaggaatgagatccgtgagatccttccatcttcttgaagtcgcctttagggtggctgcgaggtagagggttgggggttggtgggctgtcacggagcgactgtcgagatcgcctagtatgttctgtgaacacaaataaaattgatttactgtctgcaaaaaaaaaaaaaaa

SEQ ID NO: 253 - DNA, 3987 bp, Homo sapiens
  leukemia inhibitory factor transcript variant 1 (LIF), cholinergic differentiation factor (CDF), hepatocyte-stimulating factor III, melanoma-derived LPL inhibitor (MLPLI), differentiation-inducing factor (DIF)
  CDS (157)...(765): LIF
cttcctggactggggatcccggctaaatatagctgtttctgtcttacaacacaggctccagtatataaatcaggcaaattccccatttgagcatgaacctctgaaaactgccggcatctgaggtttcctccaaggccctctgaagtgcagcccataatgaaggtcttggcggcaggagttgtgcccctgctgttggttctgcactggaaacatggggcggggagccccctccccatcacccctgtcaacgccacctgtgccatacgccacccatgtcacaacaacctcatgaaccagatcaggagccaactggcacagctcaatggcagtgccaatgccctctttattctctattacacagcccagggggagccgttccccaacaacctggacaagctatgtggccccaacgtgacggacttcccgcccttccacgccaacggcacggagaaggccaagctggtggagctgtaccgcatagtcgtgtaccttggcacctccctgggcaacatcacccgggaccagaagatcctcaaccccagtgccctcagcctccacagcaagctcaacgccaccgccgacatcctgcgaggcctccttagcaacgtgctgtgccgcctgtgcagcaagtaccacgtgggccatgtggacgtgacctacggccctgacacctcgggtaaggatgtcttccagaagaagaagctgggctgtcaactcctggggaagtataagcagatcatcgccgtgttggcccaggccttctagcaggaggtcttgaagtgtgctgtgaaccgagggatctcaggagttgggtccagatgtgggggcctgtccaagggtggctggggcccagggcatcgctaaacccaaatgggggctgctggcagaccccgagggtgcctggccagtccactccactctgggctgggctgtgatgaagctgagcagagtggaaacttccatagggagggagctagaagaaggtgccccttcctctgggagattgtggactggggagcgtgggctggacttctgcctctacttgtccctttggccccttgctcactttgtgcagtgaacaaactacacaagtcatctacaagagccctgaccacagggtgagacagcagggcccaggggagtggaccagcccccagcaaattatcaccatctgtgcctttgctgccccttaggttgggacttaggtgggccagaggggctaggatcccaaaggactccttgtcccctagaagtttgatgagtggaagatagagaggggcctctgggatggaaggctgtcttcttttgaggatgatcagagaacttgggcataggaacaatctggcagaagtttccagaaggaggtcacttggcattcaggctcttggggaggcagagaagccaccttcaggcctgggaaggaagacactgggaggaggagaggcctggaaagctttggtaggttcttcgttctcttccccgtgatcttccctgcagcctgggatggccagggtctgatggctggacctgcagcaggggtttgtggaggtgggtagggcaggggcaggttgctaagtcaggtgcagaggttctgagggacccaggctcttcctctgggtaaaggtctgtaagaaggggctggggtagctcagagtagcagctcacatctgaggccctgggaggccttgtgaggtcacacagaggtacttgagggggactggaggccgtctctggtccccagggcaagggaacagcagaacttagggtcagggtctcagggaaccctgagctccaagcgtgctgtgcgtctgacctggcatgatttctatttattatgatatcctatttatattaacttattggtgctttcagtggccaagttaattcccctttccctggtccctactcaacaaaatatgatgatggctcccgacacaagcgccagggccagggcttagcagggcctggtctggaagtcgacaatgttacaagtggaataagccttacgggtgaagctcagagaagggtcggatctgagagaatggggaggcctgagtgggagtggggggccttgctccacccccccccatcccctactgtgacttgctttagggtgtcagggtccaggctgcaggggctgggccaatttgtggagaggccgggtgcctttctgtcttgattccagggggctggttcacactgttcttgggcgccccagcattgtgttgtgaggcgcactgttcctggcagatattgtgccccctggagcagtgggcaagacagtccttgtggcccaccctgtccttgtttctgtgtccccatgctgcctctgaaatagcgccctggaacaaccctgcccctgcacccagcatgctccgacacagcagggaagctcctcctgtggcccggacacccatagacggtgcggggggcctggctgggccagaccccaggaaggtggggtagactggggggatcagctgcccattgctcccaagaggaggagagggaggctgcagatgcctgggactcagaccaggaagctgtgggccctcctgctccacccccatcccactcccacccatgtctgggctcccaggcagggaacccgatctcttcctttgtgctggggccaggcgagtggagaaacgccctccagtctgagagcaggggagggaaggaggcagcagagttggggcagctgctcagagcagtgttctggcttcttctcaaaccctgagcgggctgccggcctccaagttcctccgacaagatgatggtactaattatggtacttttcactcactttgcacctttccctgtcgctctctaagcactttacctggatggcgcgtgggcagtgtgcaggcaggtcctgaggcctggggttggggtggagggtgcggcccggagttgtccatctgtccatcccaacagcaagacgaggatgtggctgttgagatgtgggccacactcacccttgtccaggatgcagggactgccttctccttcctgcttcatccggcttagcttggggctggctgcattcccccaggatgggcttcgagaaagacaaacttgtctggaaaccagagttgctgattccacccggggggcccggctgactcgcccatcacctcatctccctgtggacttgggagctctgtgccaggcccaccttgcggccctggctctgagtcgctctcccacccagcctggacttggccccatgggacccatcctcagtgctccctccagatcccgtccggcagcttggcgtccaccctgcacagcatcactgaatcacagagcctttgcgtgaaacagctctgccaggccgggagctgggtttctcttccctttttatctgctggtgtggaccacacctgggcctggccggaggaagagagagtttaccaagagagatgtctccgggcccttatttattatttaaacatttttttaaaaagcactgctagtttacttgtctctcctccccatcgtccccatcgtcctccttgtccctgacttggggcacttccaccctgacccagccagtccagctctgccttgccggctctccagagtagacatagtgtgtggggttggagctctggcacccggggaggtagcatttccctgcagatggtacagatgttcctgccttagagtcatctctagttccccacctcaatcccggcatccagccttcagtcccgcccacgtgctagctccgtgggcccaccgtgcggccttagaggtttccctccttcctttccactgaaaagcacatggccttgggtgacaaattcctctttgatgaatgtaccctgtggggatgtttcatactgacagattatttttatttattcaatgtcatatttaaaatatttattttttataccaaatgaatacttttttttttaagaaaaaaaagagaaatgaataaagaatctactcttggctggcaaaaaaaaaaaaaaaaaa

SEQ ID NO: 254 - DNA, 4992 bp, Homo sapiens
  sprouty homolog 4 (Drosophila) transcript variant 1 (SPRY4, spry-4), HH17
  CDS (242)...(1210): SPRY4
attcataaaaaagccattttcccaggcagtggttgcaacatcgccgcggaggtagcgagctgagctgacagcgcggagctggcgctgtggagcgcagggagccttgccggttcctccgaccggcgtctgcgagtacagcggcggctaacctgccccggcttcaggatttacacagacgtggggcgatgcttgtgaccctgcagctcctcaaaccagcctgtattgagcggtttgcagcctgatgctcagccccctccccacagggcccctagaagcctgtttctccgtacagtccaggacctccagccccatggagcccccgatcccacagagcgcccccttgactcccaactcagtcatggtccagccccttcttgacagccggatgtcccacagccggctccagcacccactcaccatcctacccattgaccaggtgaagaccagccatgtggagaatgactacatagacaaccctagcctggccctgaccaccggcccaaagcggacccggggcggggccccagagctggccccgacgcccgcccgctgtgaccaggatgtcacccaccattggatctccttcagcgggcgccccagctctgtgagcagcagcagcagcacatcctctgaccaacggctcttagaccacatggcaccaccacccgtggctgaccaggcctcaccaagggctgtgcgcatccagcccaaggtggtccactgccagccgctggacctcaagggcccggcggtcccacccgagctggacaagcacttcttgctgtgcgaggcctgtgggaagtgtaaatgcaaggagtgtgcatccccccggacgttgccttcctgctgggtctgcaaccaggagtgcctgtgctcagcccagactctggtcaactatggcacgtgcatgtgtttggtgcagggcatcttctaccactgcacgaatgaggacgatgagggctcctgcgctgaccacccctgctcctgctcccgctccaactgctgcgcccgctggtccttcatgggtgctctctccgtggtgctgccctgcctgctctgctacctgcctgccaccggctgcgtgaagctggcccagcgtggctacgaccgtctgcgccgccctggttgccgctgcaagcacacgaacagcgtcatctgcaaagcagccagcggggatgccaagaccagcaggcccgacaagcctttctgacagtttgtgtcgaagccccagtgctctgcctggaaacctggttctcttctgacatctaagaagactgcagcaaggtcagaggttttagcctcctgaggctgaccttgctagtctgcccactccctacccccagcttcggaaaatacagagaccaccaccacgtaccctgtattccccaaggtgatgaagaagcactttggggctttttttcagggtcctgaaactttgtgtcaaacagacaatgcaggggcagggtgtggtttggggggaaatttttctttttcagaagacagaacacagatgtggacacatatccggaaactgcagctgcttgaatgccttcccagcccctccttctccctccctccctccgcccccccccccttcctcttttccattgtctttggctctcacaggagctagctgcctgggaggaattgttaactgagtaccagggtacctttaaagaagacccttggagtcttctataccttcttctccttccccatctcactccaccccactttgtccctgatgtcttggggaaggtgtagaacaccctagcagttcctattgtatatacttgggagccactgagaacagaggacggccagtgagtccaagcctcgttcctccttctgcctccccggagccacaggatggatttaggagccactgctcagtgcacttctcccttccaactgcatcaactaactctcgggggtgttctgctcaccacaccgtccttcggttcttactgagtcacagactcgcctgcccactacgtgtcctgggttctctctactcagatcccttccagaaactttatatgggtagaggaagccagggcggcaaatgcgagaccaaatatcattttgccaatgagtctgaggctgtggtctctggatccagtcattatgtttttatagaataattaaaccggatgctaacggtgttttaaaaaataataataaaacaacttgtttccttttggccacccccaggaagggctgatttcaaaatctgggggcgagcaacctcaaggaacacaatttccctccctatcaacaagaggattttaacagcaaagaagagaggcagcacctcccattggcagaatgaccgctgagccaggctgggtttgggtttcttctcttctgattctgctgctcactgtcatagccttttgtgtatagtgatgtgtctgtatctttaatgtaaatagagagatgatgaaaaaagagtctattttagtgttaggaagccccagcaggggagtcggaagagcttggaagagctggggagagggtaggggaaaggtttttccaggggccactgggtttgagccctgcttctgtgcacagccacaccaccctctcccgacagccctcaaagacgtagcaactctttctctcaaggtgctaaaggactcagaaggtgcagcacgtccagtgggtaggtacttgttgcatgcaaaagctgtagtgtatctggtccttcctccccagcttttgtgtggggttcttgctttgtgtggtattttgttttcccctctaatgagagggcatggcctgagtcagaagagctaccccaggtgaaactggaagtgcatgaggcagagcgtccgtagcatttccagtttgttctgtataggaacagaggtgcctccgggaaggaggcagcgaggtaggtagctatgataggcacctaatgcttctcaaggacttattttttccttcttgaagactagtagtaacatcttatgatttagagtaagttgattgtaaccataggtatttattgattggaggaagggagggtcatattattttcggctttatttatgtaacatttgctagcttgtaaaaggcgaatgtgaaatattgcatctgcattttccaaggctgattcgtgtagctacccttgccacagttgtgacggatgtatggatgttcttgaacatttcagaaggagtggtagaaaaaaacacacattcagccaaccacttatatgaattgaatgtatcagaagtgtactgaagggactggagatggttttcctcagatgagggggccccaaaattgatagtgcacatctgcacgctttctgcgaggcctcagaacttcccagggcccctccctcaaattgtctccatgggaaacttgacccagtggcaagttgcactttggtgatcttggtggtctacacacccgttctgtggagagtcgatttacataagctgtgtatacacacacacacacacacacacacacccctaccccacactgactgtctaccgacaaagaccctatttcctggcaaacggcctcctgaaccctgactttttgtgtacatacttgtaaacacggatttttctgggttttggtttgctttttccttttttccccctgcccctgttctagcttgttcttcttggtttgctttcaacctgcttgatggatgtctgcagagtgctctctaagagtccacctcagtgcctcgtgtgctcagtggtcatgggaaaggagcgaaggaaccatccttggttctcccagcttggttgtgtagcaatccctcagcattgtttttctcagcttcttggcaaaaattaaaacaacaacaacaacaacaacaacaacaacaaacagaaggataaactggcttgcctgtggaccctccccggctctggggccagtcgagagccactgagggacccagcactcagagacacaacacacatgtgtagctgcttctggctgagtgtgtttcctgtcaccaatggcctgtttggctggacgatgcctcggcttgaccttttttgaaaagtgctggttagttcccgcccctggtaaacctggggtaggtgggggttctgtcttaactcgaggggcacctgggatccaggacgcttctagggggctctggctgcccgtgttaatgaaggacagcgcttccgcgagcaccctgggaactgggtcttgggtagcaaagccctcccagagaaaagattgggcacaactaaggctttcctgagcaggaagggggtgaagaccaatcccttcctttggtcctttggtacgcaccccctcagagctgagatggaagacatggctagttcttttcagccttgtggagcctgtcagtcgccatcatacctcgagtgaggcccagctagataatgacttgtccaagatggcacacgtggaaagttgatctgcaccagaacccggatgactgtcaccttgaagcatcctgttctccttctgtgctgtcccaggaagtgtctggcgggcgtgggcagcacagctctacactgtacgattcactagggcatcctgcgagcctcactagccttctggttcatgcctttgacaagcatttttgtgccccctctgcttactgtgacagtcgatgatgaatcttgcgttgccattttctgctgtgggtaactgcgtgcagtgtcttgccttgctttctcttcttactgtcccacagcttggtttcatgttacaaacagaaaagctcgaggctcccaccccgccacatcccaacttcatttccccctcactgtagcccatttccaccccaccacaaagttgccacaggttttctttgtatagaatatttattttgaagctctattttaatagtatttattttagaaagtctactattgtaagagttcttctgtttgtgaagaaaaaaacaagttaaaaactgaatgtactgatttagaaaatatatataaatatatattgttaaatatacacgggactgccgtt

SEQ ID NO: 255 - DNA, 5625 bp, Homo sapiens
  dual specificity phosphatase 4 transcript variant 1 (DUSP4), serine/threonine specific protein phosphatase, mitogen-activated protein kinase phosphatase 2, MAP kinase phosphatase 2 (MKP-2, MKP2), TYP
  CDS (473)...(1657): DUSP4
acctagcgccccctcccccgggagcgcggaggagcattaataaacctctaagccgaggagaaaactctggctggggcagtgcgctgagcgccggaggagcgtaggcagggcagcgctggcgccagtggcgacaggagccgcgcgaccggcaaaaatacacgggaggccgtcgccgaaaagagtccgcggtcctctctcgtaaacacactctcctccaccggcgcctccccctccgctctgcgcgccgcccggctgggcgcccgaggccgctccgactgctatgtgaccgcgaggctgcgggaggaaggggacagggaagaagaggctctcccgcgggagcccttgaggaccaagtttgcggccacttctgcaggcgtcccttcttagctctcgcccgcccctttctgcagcctaggcggcccgggttctcttctcttcctcgcgcgcccagccgcctcggttcccggcgaccatggtgacgatggaggagctgcgggagatggactgcagtgtgctcaaaaggctgatgaaccgggacgagaatggcggcggcgcgggcggcagcggcagccacggcaccctggggctgccgagcggcggcaagtgcctgctgctggactgcagaccgttcctggcgcacagcgcgggctacatcctaggttcggtcaacgtgcgctgtaacaccatcgtgcggcggcgggctaagggctccgtgagcctggagcagatcctgcccgccgaggaggaggtacgcgcccgcttgcgctccggcctctactcggcggtcatcgtctacgacgagcgcagcccgcgcgccgagagcctccgcgaggacagcaccgtgtcgctggtggtgcaggcgctgcgccgcaacgccgagcgcaccgacatctgcctgctcaaaggcggctatgagaggttttcctccgagtacccagaattctgttctaaaaccaaggccctggcagccatcccacccccggttccccccagtgccacagagcccttggacctgggctgcagctcctgtgggaccccactacacgaccaggggggtcctgtggagatccttcccttcctctacctcggcagtgcctaccatgctgcccggagagacatgctggacgccctgggcatcacggctctgttgaatgtctcctcggactgcccaaaccactttgaaggacactatcagtacaagtgcatcccagtggaagataaccacaaggccgacatcagctcctggttcatggaagccatagagtacatcgatgccgtgaaggactgccgtgggcgcgtgctggtgcactgccaggcgggcatctcgcggtcggccaccatctgcctggcctacctgatgatgaagaaacgggtgaggctggaggaggccttcgagttcgttaagcagcgccgcagcatcatctcgcccaacttcagcttcatggggcagctgctgcagttcgagtcccaggtgctggccacgtcctgtgctgcggaggctgctagcccctcgggacccctgcgggagcggggcaagacccccgccacccccacctcgcagttcgtcttcagctttccggtctccgtgggcgtgcactcggcccccagcagcctgccctacctgcacagccccatcaccacctctcccagctgttagagccgccctgggggccccagaaccagagctggctcccagcaagggtaggacgggccgcatgcgggcagaaagttgggactgagcagctgggagcaggcgaccgagctccttccccatcatttctccttggccaacgacgaggccagccagaatggcaataaggactccgaatacataataaaagcaaacagaacactccaacttagagcaataacggctgccgcagcagccagggaagaccttggtttggtttatgtgtcagtttcacttttccgatagaaatttcttacctcatttttttaagcagtaaggcttgaagtgatgaaacccacagatcctagcaaatgtgcccaaccagctttactaaagggggaggaagggagggcaaagggatgagaagacaagtttcccagaagtgcctggttctgtgtacttgtccctttgttgtcgttgttgtagttaaaggaatttcattttttaaaagaaatcttcgaaggtgtggttttcatttctcagtcaccaacagatgaataattatgcttaataataaagtatttattaagactttcttcagagtatgaaagtacaaaaagtctagttacagtggatttagaatatatttatgttgatgtcaaacagctgagcaccgtagcatgcagatgtcaaggcagttaggaagtaaatggtgtcttgtagatatgtgcaaggtagcatgatgagcaacttgagtttgttgccactgagaagcaggcgggttgggtgggaggaggaagaaagggaagaattaggtttgaattgctttttaaaaaaaaaagaaaagaaaaagacagcatctcactatgttgccaaggctcatcttgagaagcaggcgggttgggtgggaggaggaagaaagggaagaattaggtttgaattgcttttttaaaaaaaaagaaaagaaaaaaaaagacagcatctcactatgttgccaaggctcatctcaagctcttgggctcaagagatcctcccacctcggcctcctgagtagctgggactgcaggtgtgtgtcatcatgaccaatgtgaattgcttttgaagctggttcatgggcatgtaggccaccgaagcaattttagaccacagtaagtcaagcttttttccctccgatgatcactgggtggttgcagcattttttgcataaacctgcctaagacttgtctatcgtctgtgatcaatatgccatattacactaaggtgctcctggaaaattgggtgcagttcaaattttcctacagcaaatcatttggcaaggccagccattggggaaaccagacaactagagataaccctgaaatgaatccttttgtaaattgaagcaccatcttttctttttttgcataaattggaggttttaattttagggcagttacctgaagtgaaatataccaacaatttcttgtgttctttaaattcctagttaggtgaatatttttgaaggtcctcttttgaataaagaggggaatggacaccacatttcaggtcttctcgaagtgtggaagggcaagagagcatcagtgagctgatggtggattgcttacatcggattccattggtatgaatttcccaaactggaaatcaaagcgccagggtggggttggggctgactgctggtgagggggctggccgctggctcccgtgacgtgcgtcatgggcacgcaggcgccattttgaatctatcgtcggcacgtgggtgccattttgaatccttagttgggcctttctaaatggagaatggctttggagggagacacgttttctgtggggagggtttgggggggagggaggagggaacaagctacatgctattttgtttgtagtattgtggaacagtcttgttatggagtgccagcttagaggttgttgcaaacttgtctagaagtgagagcatggttttttttagccctttgagagtctacatctaatgaacattcttgctcacccataaataacgtcaagcctcaatgtcaccgtcacgttgggatactctttctcatctggcatcctagacaggacaaggttggttacctttccttccatgaaccatgaacctgtgacggcatcattcatcctgacttcaccaagctccgcctgtgggtgaggccagagctcccactggcaatttttagaagagccagaggctccctgcttcctctagaaataacagttcagggtgaagcatggagggtttcagttcccagacaatggaaccatttagagacaacacagttggacatttccactttttccttgattcctggaagtccagtgggttctgcagctgaaaaagccctgggtcccagcagcagagagacaggacagaggggatgcttgggcggggagggacggtaacctgcagaacagattccatttttatagaacgagtacacgtttgctaaaacagtcctgctttcccagactggattcccaccacagggacagtcggaactcaggactagctccagcgacatctttcctccgaattcaagccttctatcacaatgtcaaaacagctatttataaagccattttcattgtacttgataacagcacgagtcccaaaacttttagaaataaaataggacattggcttgattgaaaagagggactttttaaaaattgttctttcgtcagaagccttttggatgacttacaatagctctgatgaagataccaccccagcgtcagtccaataggtcagtgagtttcaacaggcatccatccctcccatgaagggattctggtgatgggaagtttctgtaatgacaggaaagcattgaccctcattgattgtcaactttggtattagccatgaaagacaggatgctcattgggtgttctgtagagtgaggaatgctgcctattccctcccagaacgtctgacccaggggtgtgtgttgaggagccctgggggaaatggaccaagttttcccacagagcagtattaggctgaagagcaggtgactggtaggccccagctcccatcattccctcccaaagccattttgttcagttgctcatccacgctggattccagagagttttccaatttgggaagccatgagaaaggtttttaaatcttgggaagatggagagagggacataggatagttgactccaacatgacaggaagaggctggagattgggaattggccatcaaccaagcctgtagtagtaaagccatggtcccgcattggaattacttggggaacttatacagttctgatacccaggctctcctagaccagttcaaccaattctaggtgggggactcaggcatcagtgtgtttcgtagctccccgggtgttttccctgtgcagccgagcttgggaaactgccatgctttttggatgtcaaggcgctgttggaggctgggtgtgacagcacagagccaggttgtcttgtggaaaccacagccacgggtttgccactggctcagcatggcctcactgccagtcccagcctggctgagggacaagatggtttctcttgggagttcctgagtggagcacccttccaggctttttgaaagccagctgatctgtggagccttgttaagggactcaatacggtgtttggatattgatgtttttccttgagactgtcttgtccatcaataaagatggaggatgtctcctctttgaaccccgcttccccaccagtactctctctcccttagagtttatgagttattcaaggaggagacttcttaaagacagcaacgcaattcttgtaacttgtgtaaatagccccatctttcagagtgataccatttctacatttgataatgcctgtattcctgtaggatgtatatagtttaggggattttttttttgtttggttttgttttttagaagtcaatatgtctggttttatttattgcttgaaaaagatcatttgaaaaaaataaatacattttcaaccactaaaa

SEQ ID NO: 256 - DNA, 5425 bp, Homo sapiens
  SH2B adaptor protein 3 (SH2B3), signal transduction protein Lnk, lymphocyte-specific adapter protein Lnk, IDDM20
  CDS (358)...(2085): SH2B3
cccgggccaccgcctccgcccggctgcccgcccggactgtcgcggcccgcggtggcgacggcggccgctgcaaagtttccccggcggcggcggcccgggggcgcatcctcccgcaactgtcaagcgctggcggcggaaatgatgaggcgctggccattttccgagcccgggtttcctgcctgagccccgctcgagcgagccgcgagcgaggagccggcgggcgggagaggacgcgcccagggcgggggcccgcccgccccctcgggatttcgagggcccgggggcgcgcgacgccatgggccggccgggcccagagctcctgtctctcagcccggccgcaccacctgggtctccgccatgaacgggcctgccctgcagccctcctcgccctcttccgcgccctcagcctccccggcggcggccccgcggggctggagcgagttctgtgagttgcacgccgtagcggcggcccgggagctggcccgccagtactggctgttcgcccgggagcatccgcagcacgcgccgctgcgcgccgagctggtgtcgctgcagttcaccgacctcttccagcgctacttctgccgcgaggtgcgcgacggacgggcgccgggccgcgactaccgggacacaggccgtgggcccccagccaaggccgaggcgtccccggagccaggccccggccccgccgcccctggcctgcccaaggcccgcagctctgaggagctggccccgccgcggccgcccgggccctgctccttccagcactttcgccgcagcctccgccacatcttccgccgccgctcggccggggagctgccagcggcccacaccgctgccgcccccgggacccccggagaggctgctgagacccccgcccggcctggcctggccaagaagttcctgccctggagcctggcccgggagccgccacccgaggcgctgaaggaggcggtgctgcgctacagcctggccgacgaggcctccatggacagcggggcacgctggcagcgcgggaggctggcgctgcgccgggccccgggccccgatggccccgaccgcgtgctggagctcttcgacccacccaagagttcaaggcccaagctacaagcagcttgctccagcatccaggaggtccggtggtgcacacggcttgagatgcctgacaacctttacacctttgtgctgaaggtgaaggaccggacagacatcatctttgaggtgggagacgagcagcagctgaattcatggatggctgagctctcggagtgcacaggccgagggctggagagcacagaagcagagatgcatattccctcagccctagagcctagcacgtccagctccccaaggggcagcacagattcccttaaccaaggtgcttctcctggggggctgctggacccggcctgccagaagacggaccatttcctgtcctgctacccctggttccacggccccatctccagagtgaaagcagctcagctggttcagctgcagggccctgatgctcatggagtgttcctggtgcggcagagcgagacgcggcgtggggaatacgtgctcactttcaactttcaggggatagccaagcacctgcgcctgtcgctgacagagcggggccagtgccgtgtgcagcacctccactttccctcggtcgtggacatgctccaccacttccagcgctcgcccatcccactcgagtgcggcgccgcctgtgatgtccggctctccagctacgtggtagtcgtctcccaaccaccaggttcctgcaacacggtcctcttccctttctcccttcctcactgggattcagagtcccttcctcactggggttcagagttgggccttccccaccttagttcttctggctgtccccgggggctcagcccagagggtctcccagggcgatcctcaccccccgagcagatcttccacctggtgccttcgcccgaagaactggccaacagcctgcagcacctggagcatgagcctgtgaatcgagcccgggactcggactacgaaatggactcatcctcccggagccacctgcgggccatagacaatcagtacacacctctctgaccagtgaggaattccaggcctcaacagctgcccttgaggagcacaggcagaagtgtgaacttgtgaatgtaattgatctttccttccttccagagaaagatttaagggacactgttaactgctcgtgccagtttggaagtgacccttctattaggcctgttgaagggccctcctgtaggtttcatctatccacctggctttctccttattgtttacagatgtagttcttgttagaggatgccgctagctcctgcccggggtccctatgcccagtccccgttactcttagagaaaggagttggggtgagggccagagctggcagtggaaacttgttctctttttcactgacactgtcacagcggatgacagactttctacggggaggagggggggatcatcaggaagcccagaacactaacaagcggttctcccatctaccgtcagtccacatggcaggtctgctgtgtccacaccacagatgaccacatctaatcctgcttctactctcagctttaggacaaaagctctgtcagaggcacaagctgaaggtcaaaaatgatttaaaacattttacctcagactaatttctttaaaggattcaggttcaaaacttaaccactgcttatttcagtgcactgtttcaactaacacccatgctatttttgtagtcagaaacagctatgcaaaccctacctaatttacagtctgagccagcatgctggcttgtctactgcatcctcgggacagtcacctgccactgagtggccactgtccttcctaaatgtcaagaagtgaagtatgtcaccctttcagggaaattcaggcaattactgaaataggagggtggcaagaacagttctatcctggtgccttacgaataaaaaactggattctggtttacagcagctttacagtgatagttaaattaactggggctaggggaagagcaagcaaaaagggaagaaggactcctaggccctttctagtaaatccttcagcaacaaggctggcttggtgccctccaagcatctaatggcttattaaattatcccacaagtgggttttaggctccttttttgagccaaaatggaagctgggaatctggtgccataactaatgagaaactcctttaatagcccacaatcagtgttctgttctagctggctactgcttcactggattgagaatctatctatctccttgcacacatgggcacacacaatctccaccatccagggaggtcctgaagtcaaatctctatctatacaagtgatacaattcatagggggctggctcctcccagaacctgtctggaggctcagaaacgggggcagtgacagtggagtcagctgctcttgggtgccagcagagccattcagtacaacccccaggctcacagcagtggcttctaggaaactgggagtttagatcagctttacagatacatcgatcagaggctaaaatgaaacctcagcctaaaactcataggactgactgcctgggaggagggttaggtctgcttcttccacttatacttagtctctgtgctccaagaggtcaaatttttgcttctagaatttccttggggtctttcagagggtgggggaacaaacccctatgcacttttcttttttttttttttgagatggagtttctcttgtcaaccgggctggagtgcagtggtgcaatcttggctcactgcaacctccaccttcctggttcaagcgattctgcctcgacctctcaagtagctgggattacaagcaccagccaccatgcctggctaattttgtatttttagtagagacagggtttcaccatgttggccaggctggtctcgaatgtctgacctcaggtgatccacccgccttggcctcccaaagtgctgggattacaggcgcgagccaccgcgcccagcctacaccacttttagtaccaacactcttgggtgatttcatggaccctaaagcagacctgacactgatccagatttgcagtccatttttaaggacacctgtctttatttcctcaaagtcaagcagctttctctggaaaatgaatgctaattagtgtgaaccaaaagagtaagtaagagtctgaagtttttttaaaggagaaagcttattatggaaagtcactggtcctcccctccgcacaggaaaggtacccagtagataatgaaccaaattaagttccctccctccagccagaagttaaacatctgggatatgacgtcttcatgccaggggcactcatttcttagcagcctctctacatacatctctcaggtggtgccaagaggcacaccaggtagagcaaacttagcagctctgactaacaggctgcaaagtgcaagttcagattctgtggcagagatttggaaggcacccacctccagactgcttcccgtccaagttaccaggacagctcaaaaacatgctgacagaaaactcccatggctctaggaagaagtgacactaagccaacacctttctttatgtgggagcagaatcagctgatgaaggggtgggcagcagtgtggggcaggcaccccactggctgcagctagcccaccataggcacagcacatcccaccactctccttccagtcctgaccaggccccagccggcaacttctaccgagagccatggctcaacaccaaactggacagtagacatcatgatccctccagttagctctaattacagaccccaccagtacagcttgacagctcccggcaccatcccttccttcatctgacttattgaacttttacaaactaacagtcaccagcaccaaagaattaagtcaactaacctgccttgaattttagaccagcaatccatatggctttatctggtataaatcttctgcctttgatcatttctggaccgtaggaaaaaggaatagcaatcattaaaatcttgggccagagaacactatttttacataacagtttcttaacctaaagtcaaggccttggactcttccctgagggttgcctgagattccttcatgctttctattcaggactaagtcccttactgcaaatgtgttagctctaacatctcccacaagctagaggaacttgcgagtatattaacaaggacacatctgacatcctgtgtttggttagaatatacagcacattgtgataacataaagtggattcatcttgtatcattataggcagaaggtatttggcaaatttttatgtattgttttatgtactgtacaagtaacttattcttgaataatgcaaattttgctataatgtacaaattgctatatgtgaattaaaaagttttcagaatcttgaaaaaaaaaaaaaaaaaaaa

SEQ ID NO: 257 - DNA, 2145 bp, Homo sapiens
  G protein-coupled receptor 3 (GPR3), ACCA orphan receptor, adenylate cyclase constitutive activator
  CDS (96)...(1088): GPR3
cgcgggggtttctcggggtccacgcacgccctgcgccgccaggacccgagcggagcctccccgcggcccggccgcgcctggtcctgagcggtaccatgatgtggggtgcaggcagccctctggcctggctctcagctggctcaggcaacgtgaatgtaagcagcgtgggcccagcagaggggcccacaggtccagccgcaccactgccctcgcctaaggcctgggatgtggtgctctgcatctcaggcaccctggtgtcctgcgagaatgcgctagtggtggccatcatcgtgggcactcctgccttccgtgcccccatgttcctgctggtgggcagcctggccgtggcagacctgctggcaggcctgggcctggtcctgcactttgctgctgtcttctgcatcggctcagcggagatgagcctggtgctggttggcgtgctggcaatggcctttaccgccagcatcggcagtctactggccatcactgtcgaccgctacctttctctgtacaatgccctcacctactattcagagacaacagtgacacggacctatgtgatgctggccttagtgtggggaggtgccctgggcctggggctgctgcctgtgctggcctggaactgcctggatggcctgaccacatgtggcgtggtttatccactctccaagaaccatctggtagttctggccattgccttcttcatggtgtttggcatcatgctgcagctctacgcccaaatctgccgcatcgtctgccgccatgcccagcagattgcccttcagcggcacctgctgcctgcctcccactatgtggccacccgcaagggcattgccacactggccgtggtgcttggagcctttgccgcctgctggttgcccttcactgtctactgcctgctgggtgatgcccactctccacctctctacacctatcttaccttgctccctgccacctacaactccatgatcaaccctatcatctacgccttccgcaaccaggatgtgcagaaagtgctgtgggctgtctgctgctgctgttcctcttccaagatccccttccgatcccgctcccccagtgatgtctagctgagtcttcatgacccttcaaccctgattactacagaattccagaatgttaggctctccagggcttctttccaaacccccagctccacaccccccagacccagctggttctggagttctaggacattgggtgtttcaaggttctgttcagatccctatgggggcccagctggctccacggttccagaatgttcaggtggtcagtgttctactcagaaatgtctcacagcccagctgggttgcaattccagaatgctgggagttttacagtgccattccaagtcccagatgtccctcttcccccaaacttgaccttgaccatgtcactttacgtttgaatttctgagctaaagagtcagagagattagtcacatagttgcctaaataggagagagaaagattatatatgcacatatacaaagacagtgtctatttatgattgatttatttatttataaatttacttatgggtggtaaggggcaaaaaagaggcccacaccttgatatccaggccataccagggtatcccttgtcccttcacccccatttctgacctcagttcctggaggggggaaagggtgaaagagaaaccacgtattttgttattattttggattattttttatcgaagagatcatagaaaccagagccttctccccaggcctgccctcctcgggtttggaaggggaacacaccagcctctggttttttatttttttaagaagccatcacctgagcaaccaaaaattcctctgcgctggggtccgactgccctctggtggccatttggggaaaactgcagcccggccaggcagctgggaccagaatgcaaccccagctccactccagcctggcgtccagggccacagccatggcctgggggccaagcctcaccctgcggtgccctaaaggagggggggcacgagccaacaccccacccctctgccaaccggggtatggcccccagtgcattccctgttcccgtctccaacccaactcaataaaaaatgattttgtcataaaaaaaaaaaaaaaaaaaaaaaaaaaaaaaaaaaaa

SEQ ID NO: 258 - DNA, 8605 bp, Homo sapiens
  tenascin C (TNC, TN-C, TN), hexabrachion (HXB), cytotactin, myotendinous antigen, glioma-associated-extracellular matrix antigen (GMEM), deafness, autosomal dominant 56 (DFNA56), neuronectin, GP 150-225
  CDS (413)...(7018): TNC
aattcgccaactgaaaaagtgggaaaggatgtctggaggcgaggcgtcccattacagaggaaggagctcgctatataagccagccaaagttggctgcaccggccacagcctgcctactgtcacccgcctctcccgcgcgcagatacacgcccccgcctccgtgggcacaaaggcagcgctgctggggaactcgggggaacgcgcacgtgggaaccgccgcagctccacactccaggtacttcttccaaggacctaggtctctcgcccatcggaaagaaaataattctttcaagaagatcagggacaactgatttgaagtctactctgtgcttctaaatccccaattctgctgaaagtgagataccctagagccctagagccccagcagcacccagccaaacccacctccaccatgggggccatgactcagctgttggcaggtgtctttcttgctttccttgccctcgctaccgaaggtggggtcctcaagaaagtcatccggcacaagcgacagagtggggtgaacgccaccctgccagaagagaaccagccagtggtgtttaaccacgtttacaacatcaagctgccagtgggatcccagtgttcggtggatctggagtcagccagtggggagaaagacctggcaccgccttcagagcccagcgaaagctttcaggagcacacagtggatggggaaaaccagattgtcttcacacatcgcatcaacatcccccgccgggcctgtggctgtgccgcagcccctgatgttaaggagctgctgagcagactggaggagctggagaacctggtgtcttccctgagggagcaatgtactgcaggagcaggctgctgtctccagcctgccacaggccgcttggacaccaggcccttctgtagcggtcggggcaacttcagcactgaaggatgtggctgtgtctgcgaacctggctggaaaggccccaactgctctgagcccgaatgtccaggcaactgtcaccttcgaggccggtgcattgatgggcagtgcatctgtgacgacggcttcacgggcgaggactgcagccagctggcttgccccagcgactgcaatgaccagggcaagtgcgtaaatggagtctgcatctgtttcgaaggctacgccggggctgactgcagccgtgaaatctgcccagtgccctgcagtgaggagcacggcacatgtgtagatggcttgtgtgtgtgccacgatggctttgcaggcgatgactgcaacaagcctctgtgtctcaacaattgctacaaccgtggacgatgcgtggagaatgagtgcgtgtgtgatgagggtttcacgggcgaagactgcagtgagctcatctgccccaatgactgcttcgaccggggccgctgcatcaatggcacctgctactgcgaagaaggcttcacaggtgaagactgcgggaaacccacctgcccacatgcctgccacacccagggccggtgtgaggaggggcagtgtgtatgtgatgagggctttgccggtgtggactgcagcgagaagaggtgtcctgctgactgtcacaatcgtggccgctgtgtagacgggcggtgtgagtgtgatgatggtttcactggagctgactgtggggagctcaagtgtcccaatggctgcagtggccatggccgctgtgtcaatgggcagtgtgtgtgtgatgagggctatactggggaggactgcagccagctacggtgccccaatgactgtcacagtcggggccgctgtgtcgagggcaaatgtgtatgtgagcaaggcttcaagggctatgactgcagtgacatgagctgccctaatgactgtcaccagcacggccgctgtgtgaatggcatgtgtgtttgtgatgacggctacacaggggaagactgccgggatcgccaatgccccagggactgcagcaacaggggcctctgtgtggacggacagtgcgtctgtgaggacggcttcaccggccctgactgtgcagaactctcctgtccaaatgactgccatggccagggtcgctgtgtgaatgggcagtgcgtgtgccatgaaggatttatgggcaaagactgcaaggagcaaagatgtcccagtgactgtcatggccagggccgctgcgtggacggccagtgcatctgccacgagggcttcacaggcctggactgtggccagcactcctgccccagtgactgcaacaacttaggacaatgcgtctcgggccgctgcatctgcaacgagggctacagcggagaagactgctcagaggtgtctcctcccaaagacctcgttgtgacagaagtgacggaagagacggtcaacctggcctgggacaatgagatgcgggtcacagagtaccttgtcgtgtacacgcccacccacgagggtggtctggaaatgcagttccgtgtgcctggggaccagacgtccaccatcatccaggagctggagcctggtgtggagtactttatccgtgtatttgccatcctggagaacaagaagagcattcctgtcagcgccagggtggccacgtacttacctgcacctgaaggcctgaaattcaagtccatcaaggagacatctgtggaagtggagtgggatcctctagacattgcttttgaaacctgggagatcatcttccggaatatgaataaagaagatgagggagagatcaccaaaagcctgaggaggccagagacctcttaccggcaaactggtctagctcctgggcaagagtatgagatatctctgcacatagtgaaaaacaatacccggggccctggcctgaagagggtgaccaccacacgcttggatgcccccagccagatcgaggtgaaagatgtcacagacaccactgccttgatcacctggttcaagcccctggctgagatcgatggcattgagctgacctacggcatcaaagacgtgccaggagaccgtaccaccatcgatctcacagaggacgagaaccagtactccatcgggaacctgaagcctgacactgagtacgaggtgtccctcatctcccgcagaggtgacatgtcaagcaacccagccaaagagaccttcacaacaggcctcgatgctcccaggaatcttcgacgtgtttcccagacagataacagcatcaccctggaatggaggaatggcaaggcagctattgacagttacagaattaagtatgcccccatctctggaggggaccacgctgaggttgatgttccaaagagccaacaagccacaaccaaaaccacactcacaggtctgaggccgggaactgaatatgggattggagtttctgctgtgaaggaagacaaggagagcaatccagcgaccatcaacgcagccacagagttggacacgcccaaggaccttcaggtttctgaaactgcagagaccagcctgaccctgctctggaagacaccgttggccaaatttgaccgctaccgcctcaattacagtctccccacaggccagtgggtgggagtgcagcttccaagaaacaccacttcctatgtcctgagaggcctggaaccaggacaggagtacaatgtcctcctgacagccgagaaaggcagacacaagagcaagcccgcacgtgtgaaggcatccactgaacaagcccctgagctggaaaacctcaccgtgactgaggttggctgggatggcctcagactcaactggaccgcagctgaccaggcctatgagcactttatcattcaggtgcaggaggccaacaaggtggaggcagctcggaacctcaccgtgcctggcagccttcgggctgtggacataccgggcctcaaggctgctacgccttatacagtctccatctatggggtgatccagggctatagaacaccagtgctctctgctgaggcctccacaggggaaactcccaatttgggagaggtcgtggtggccgaggtgggctgggatgccctcaaactcaactggactgctccagaaggggcctatgagtactttttcattcaggtgcaggaggctgacacagtagaggcagcccagaacctcaccgtcccaggaggactgaggtccacagacctgcctgggctcaaagcagccactcattataccatcaccatccgcggggtcactcaggacttcagcacaacccctctctctgttgaagtcttgacagaggaggttccagatatgggaaacctcacagtgaccgaggttagctgggatgctctcagactgaactggaccacgccagatggaacctatgaccagtttactattcaggtccaggaggctgaccaggtggaagaggctcacaatctcacggttcctggcagcctgcgttccatggaaatcccaggcctcagggctggcactccttacacagtcaccctgcacggcgaggtcaggggccacagcactcgaccccttgctgtagaggtcgtcacagaggatctcccacagctgggagatttagccgtgtctgaggttggctgggatggcctcagactcaactggaccgcagctgacaatgcctatgagcactttgtcattcaggtgcaggaggtcaacaaagtggaggcagcccagaacctcacgttgcctggcagcctcagggctgtggacatcccgggcctcgaggctgccacgccttatagagtctccatctatggggtgatccggggctatagaacaccagtactctctgctgaggcctccacagccaaagaacctgaaattggaaacttaaatgtttctgacataactcccgagagcttcaatctctcctggatggctaccgatgggatcttcgagacctttaccattgaaattattgattccaataggttgctggagactgtggaatataatatctctggtgctgaacgaactgcccatatctcagggctaccccctagtactgattttattgtctacctctctggacttgctcccagcatccggaccaaaaccatcagtgccacagccacgacagaggccctgccccttctggaaaacctaaccatttccgacattaatccctacgggttcacagtttcctggatggcatcggagaatgcctttgacagctttctagtaacggtggtggattctgggaagctgctggacccccaggaattcacactttcaggaacccagaggaagctggagcttagaggcctcataactggcattggctatgaggttatggtctctggcttcacccaagggcatcaaaccaagcccttgagggctgagattgttacagaagccgaaccggaagttgacaaccttctggtttcagatgccaccccagacggtttccgtctgtcctggacagctgatgaaggggtcttcgacaattttgttctcaaaatcagagataccaaaaagcagtctgagccactggaaataaccctacttgcccccgaacgtaccagggacataacaggtctcagagaggctactgaatacgaaattgaactctatggaataagcaaaggaaggcgatcccagacagtcagtgctatagcaacaacagccatgggctccccaaaggaagtcattttctcagacatcactgaaaattcggctactgtcagctggagggcacccacagcccaagtggagagcttccggattacctatgtgcccattacaggaggtacaccctccatggtaactgtggacggaaccaagactcagaccaggctggtgaaactcatacctggcgtggagtaccttgtcagcatcatcgccatgaagggctttgaggaaagtgaacctgtctcagggtcattcaccacagctctggatggcccatctggcctggtgacagccaacatcactgactcagaagccttggccaggtggcagccagccattgccactgtggacagttatgtcatctcctacacaggcgagaaagtgccagaaattacacgcacggtgtccgggaacacagtggagtatgctctgaccgacctcgagcctgccacggaatacacactgagaatctttgcagagaaagggccccagaagagctcaaccatcactgccaagttcacaacagacctcgattctccaagagacttgactgctactgaggttcagtcggaaactgccctccttacctggcgacccccccgggcatcagtcaccggttacctgctggtctatgaatcagtggatggcacagtcaaggaagtcattgtgggtccagataccacctcctacagcctggcagacctgagcccatccacccactacacagccaagatccaggcactcaatgggcccctgaggagcaatatgatccagaccatcttcaccacaattggactcctgtaccccttccccaaggactgctcccaagcaatgctgaatggagacacgacctctggcctctacaccatttatctgaatggtgataaggctgaggcgctggaagtcttctgtgacatgacctctgatgggggtggatggattgtgttcctgagacgcaaaaacggacgcgagaacttctaccaaaactggaaggcatatgctgctggatttggggaccgcagagaagaattctggcttgggctggacaacctgaacaaaatcacagcccaggggcagtacgagctccgggtggacctgcgggaccatggggagacagcctttgctgtctatgacaagttcagcgtgggagatgccaagactcgctacaagctgaaggtggaggggtacagtgggacagcaggtgactccatggcctaccacaatggcagatccttctccacctttgacaaggacacagattcagccatcaccaactgtgctctgtcctacaaaggggctttctggtacaggaactgtcaccgtgtcaacctgatggggagatatggggacaataaccacagtcagggcgttaactggttccactggaagggccacgaacactcaatccagtttgctgagatgaagctgagaccaagcaacttcagaaatcttgaaggcaggcgcaaacgggcataaattccagggaccactgggtgagagaggaataaggcccagagcgaggaaaggattttaccaaagcatcaatacaaccagcccaaccatcggtccacacctgggcatttggtgagagtcaaagctgaccatggatccctggggccaacggcaacagcatgggcctcacctcctctgtgatttctttctttgcaccaaagacatcagtctccaacatgtttctgttttgttgtttgattcagcaaaaatctcccagtgacaacatcgcaatagttttttacttctcttaggtggctctgggaatgggagaggggtaggatgtacaggggtagtttgttttagaaccagccgtattttacatgaagctgtataattaattgtcattatttttgttagcaaagattaaatgtgtcattggaagccatccctttttttacatttcatacaacagaaaccagaaaagcaatactgtttccattttaaggatatgattaatattattaatataataatgatgatgatgatgatgaaaactaaggatttttcaagagatctttctttccaaaacatttctggacagtacctgattgtattttttttttaaataaaagcacaagtacttttgagtttgttattttgctttgaattgttgagtctgaatttcaccaaagccaatcatttgaacaaagcggggaatgttgggataggaaaggtaagtagggatagtggtcaagtgggaggggtggaaaggagactaaagactgggagagagggaagcactttttttaaataaagttgaacacacttgggaaaagcttacaggccaggcctgtaatcccaacactttgggaggccaaggtgggaggatagcttaaccccaggagtttgagaccagcctgagcaacatagtgagaacttgtctctacagaaaaaaaaaaaaaaaaaaatttaattaggcaagcgtggtagtgcgcacctgtcgtcccagctactcaggaggctgaggtaggaaaatcactggagcccaggagttagaggttacagtgagctatgatcacactactgcactccagcctgggcaacagagggagaccctgtctctaaataaaaaaagaaaagaaaaaaaaagcttacaacttgagattcagcatcttgctcagtatttccaagactaatagattatggtttaaaagatgcttttatactcattttctaatgcaactcctagaaactctatgatatagttgaggtaagtattgttaccacacatgggctaagatccccagaggcagactgcctgagttcaattcttggctccaccattcccaagttccctaacctctctatgcctcagtttcctcttctgtaaagtagggacactcatacttctcatttcagaacatttttgtgaagaataaattatgttatccatttgaggcccttagaatggtacccggtgtatattaagtgctagtacatgttagctatcatcattatcactttatatgagatggactggggttcatagaaacccaatgacttgattgtggctactactcaataaataatagaatttggatttaaaaaaaa

SEQ ID NO: 259 - DNA, 3285 bp, Homo sapiens
  polymerase (RNA) III (DNA directed) polypeptide G (32kD), DNA-directed RNA polymerase III subunit G (POLR3G), RNA polymerase III subunit C7 (RPC7), RNA polymerase III 32 kDa subunit (RPC32)
  CDS (201)...(872): POLR3G
actccgcggtcctggtgccgcgtgcaggtcggtgcgcgcttctcccgaggtggaacgggcggcagtcaagcgccggcgttctctgccgtcaccctttccttgccggccggcacttcggctgcagagttttgcccacgcttcgagacttagggagcagtgcctttcagaatttgcccactcatctggtataactggttctgatggctgggaataaaggaagaggacgtgctgcttatacctttaatattgaggctgttggatttagcaaaggtgaaaagttacctgatgtagtgttgaaaccacccccactatttcctgatacagattataaaccagtgccactgaaaacaggagaaggtgaagaatatatgctggctttgaaacaggagttgagagaaacaatgaaaagaatgccttattttattgaaacacctgaagaaagacaagatattgaaaggtatagtaaaagatacatgaaggtatacaaggaagaatggataccagattggagaagacttccaagagagatgatgccaagaaataaatgtaaaaaagcaggcccaaaacccaaaaaggcaaaagacgcaggcaaaggcacaccactcactaatactgaagatgtgttgaaaaaaatggaggaattggaaaaaagaggtgatggtgaaaaatcagatgaggaaaatgaagagaaagaaggaagcaaagagaaaagtaaagaaggtgatgatgacgatgacgatgatgccgcagaacaggaggaatatgatgaagaagagcaagaagaggaaaatgactacattaattcatactttgaagatggagatgattttggcgcagacagtgatgacaacatggatgaggcaacctattaggcatgaaatttttcaaaaaatatttttatgatgcagcttctgaacatttggacagacttgatttgtattttatttctgataaggaataagtacttgtttctgttgttttggacaaatagttgttaccaaaatattcaaaaccactttgagtttacatactagttaccttaaaaattattccctgacactctgacattccttctaaacacctctgccatctctcttatgtactctcatgggtttttttgtatgatttgaatatgaatgtgcctaaagaatttttgctctcttaatctatgtatacatacttgaacaaatcattcttgcttaactgctgatcttttgtaaaactattgctagtcataatggatttctataacctgaaagttgatataatacagcacgtggagcactttaaaaacaaagaaacttgaaaataattttattttttacctttacatggtgtgttctagactactgcattatgactacataaacctacctgagctcttacaagtacagaattgtgagacagaggttttgtgatggaaaacatacacatagggaaaaataccaaactgagcaatataaatttcacagctcacatcttagccagtacaaagaaactttcacatggggtgaatattataatacttgaatttgagacttaatactgtatatgaattaatcatcccactgtaataactgacatcttcaaatagttgggcttatgaaaaatttgactaagacattttattttatactttatgtaaatgtgaaataagttctggtcatataaatatgtagaatgcatgtgtgtgaactctatgaagtgaagtgtggtggccttttatgtttcagagtactcaagtgtacaattgatttatataaaaatgcaaaatgaactcaggtcattttgaaattaatattaatatttttgttgtttaactttaaagctagctcccctaactttatatattttttgggaaaaaatacctaaaaacctcagcctacaaagactctcagaaatgccaaagattttcaaggaaattcatattatatatttcaaaaatgatttatcaatgttatctaccaaaagaaataattttatttttcccctttggggagatattatcctctaatatgagaatcagatccctagattctatttctacctatactattaaactcaaccttgaacctgagcttggttgtttctgtgccttagtttctccactcgtaaacaatttcctataaaaattgtttaaacaccaaccaaaatttaccatatgtattcattctcttgccttaaagatcacttcttaacttacatttggctctcaccctctaaaaatttgtagtttggagagtaactgaaagcacaattttaagaaacatgttttcctcacaaaatatattgtaatctgattttcctatcttgtattcatgcagaaaattggagaaaatgtgtattgtcttgtgccattctgcaatatgaatttctcaggaaaaagatgtttcaatggcaatactttcttaaataattcaagatgggtgtgaggacctatcttattagtttagtgctgtgttaaccatttgtgaattacttcttgtttaaaggaagttgtcaaaaaattttaagattctaaatggaatacacgaataaagtaagccttagaatagaaacctcacaaaaagttgtcatttgcggttgataattaacataggtgttttattctctcaactccttagtaccagagccaaatacaatttagttttcagaaatcttatcaatattgttctatttacctacttataaatctgcagataaccacttgaaccaggcaaatacactgaagataaaggttatttctttttttagctttgaatttgtcatgaccattttagtcttgcagatagcagggcagccccttggggcaaggatttactctgggaggtaccgttaagagccttctttccccctttgaaagatccttttacaatgttaaagtatactagttgcaagaacaagcaggatttgcaggttgctttaccagcatgagtctcatttttctggcttaaaatctgggactgtgaaattattccataggaaagtgaatgttattttgcagaattagcctcttacataaaagtatttgttgaagtgtctttaaaattgctatcatgagcaaaactggttgctgtaatgcttgtttttctgtatttatttacacattaaattcttacaaaacaaaatgtgttcgtttgttttatagtaagatgttttattttgaacttatttaaatgtttatttgttagagaaaactaatttgttaatatagatcttaactagtaactattaagcagggatgtttgttccaaatattcttgaataaacaatcaccacaaacaa

SEQ ID NO: 260 - DNA, 3877 bp, Homo sapiens
  WD repeat domain 3 (WDR3), DIP2, UTP12, dJ776P7.2
  CDS (67)...(2898): WDR3
ggtccaatcggctgggagcctcgtggaggctgagattgcttcacctgtggtatcagacatcacaacatggggctcaccaagcagtacctacgctatgttgctagtgcggtctttggcgttatcggcagccaaaaaggtaatattgtctttgtgacacttcgtggtgagaaaggacgttatgtggcagtaccagcttgtgaacacgttttcatctgggacttaaggaaaggagagaagattcttatccttcaggggcttaaacaagaagttacttgcttatgcccctccccagatgggctacacttagctgttgggtatgaggatgggtcgatccgaatcttcagtctcctgagtggggaaggaaatgtgaccttcaatggtcacaaagcagctatcactaccttgaagtatgatcagctaggaggcagactggcatctgggtccaaggacacagatattattgtatgggatgtgatcaatgaaagtggtctgtaccgtctaaaggggcacaaggatgccatcacacaagcattgtttctacgagaaaagaacctgctagttactagtgggaaagataccatggtgaaatggtgggaccttgatactcagcactgctttaaaacaatggttggccaccggactgaggtatgggggttggttctgttgtcagaagaaaagcgactcatcactggggcctcagacagtgaactgagggtatgggacatagcttatctgcaagagattgaagacccggaagaaccagaccccaagaaaatcaaaggatcttctcctggaatacaagatactcttgaggcagaggatggtgcctttgagacggatgaagcccctgaggatcgaatcctttcatgcagaaaagctggttccataatgcgggaaggaagagacagagttgtaaaccttgcagtcgacaagacaggcaggattcttgcttgccatggaactgactctgtgctagaattgttttgtatcctttccaaaaaggaaattcagaagaaaatggataagaagatgaagaaagctagaaagaaagcaaaattacattctagcaaaggagaggaggaagatcctgaggttaatgttgaaatgagtctgcaagatgaaatccagcgggtgactaatataaaaacttctgccaaaatcaagtcctttgacttgattcattcacctcacggagagttaaaggctgtcttcctgctgcagaacaacctggtggaattgtattcactgaatccatccttgcctactcctcagcctgtcaggacaagcagaatcactattgggggtcatcgcagtgatgtgcggactttgtcattcagctcagacaatattgctgttctttcagctgcagctgattccattaaaatatggaacaggtctacactgcagtgtattcgcacaatgacctgtgaatatgcactttgctcattctttgtacctggtgatagacaggtagtcataggaacaaagacagggaagctgcagctttatgacttggcttcagggaatctgctggagacaatagatgcacatgatggagctttgtggtccatgtccctctctccagatcagcgtggctttgtgacaggtggtgcagataaatctgtcaaattctgggattttgagttagtgaaagatgaaaatagtacccaaaagagactttctgtgaagcaaacccgaactttgcaactagatgaagatgttctgtgtgtcagttactctcccaatcaaaagctattggctgtgtctttgctggactgtactgtgaaaattttctacgttgatactttaaagttttttctgtcactgtatggacacaaactgcctgttatatgcatggacatctctcatgatggagcactcatagcaactggctccgctgataggaatgtgaaaatctggggtttggactttggggactgccacaagtctctctttgcacatgatgacagtgtgatgtacctacagtttgtacccaagtctcacctcttcttcactgccggaaaagatcataagattaaacagtgggatgcagacaaatttgaacacatacagactctggagggtcatcaccaggaaatatggtgtttggctgtaagccccagtggagactatgttgtatcatcgtcccatgacaaatctctgagactttgggagagaacaagggagcctcttattcttgaggaagaaagggagatggaaagagaagcagaatatgaggagagtgtggccaaagaagaccaaccagcagttccaggagagactcaaggtgacagttactttactggaaagaaaactattgaaacagtgaaagcagctgagaggattatggaggctattgagttgtaccgagaagaaactgcaaaaatgaaggaacacaaagccatttgtaaagctgcagggaaagaggttccacttcccagcaaccccatcctaatggcttatggcagtatctcaccttcagcttatgtattagagatttttaaagggatcaagtcgagtgagctggaagaatctctacttgtgctgcctttctcttatgtcccagacattcttaaactctttaacgaattcattcagctgggctctgatgttgaacttatatgccggtgcctcttcttcctccttaggattcactttggacagatcactagcaatcaaatgcttgtgccagtgatagaaaaattaagggaaacaactatttcaaaagtcagccaagtccgggatgttatcggcttcaatatggctggtcttgattatctcaagagggaatgcgaggcaaaaagtgaagttatgttttttgctgatgctactagccacttggaagagaagaagaggaagaggaaaaagagggagaagttgattctaacgttgacttagaactgaaatgtggtatctttttttttttcaactttttcctttaaaggactcctaaactaagcacagaagagttggcgtcatcttaaaaataccaaataacagaagatcgcattgcagatgatatcaggatgtggtttccagctttgcctgagggaattccaacatgagattatgggctggctccatttcttggacttaaaatgcattattagtttaaaaatctttctgtgctctcaaagcttgagccttgcagctcaagcttgttgttccctttatattctagcagggaataaataattgttttaattaggtatttgtttcattggagttgaaattaacatttcaaaagtttttcgtatttttttatggcagatgatttgtcatttatttatattaggttttactgcctattgagacaaccaggtgcataattgattgccctttggccataaaaatgcagtgtcatggatcttagagctaaaaaggactgtaaaaattacccagaacagcgtcctcagacttaaccttctgcaagttatgtctgtatataagaagattctaattgctaactgtttatacttttctgaataaaatagttgtttctaattaaaaagtagccaagctaagatgcctggctgggcttctgaggaattaatacactcgtgtgtgtgtgtgtgtgtgtgtgtgtgtgtgtgtgtgtatgtgtatgtgtatgtacacatacatatatatagttgacacttgaaaaatgcaggtggtaggggcactgacccacccctacgccccgcacagtcaaaaatctgcatataacttttgattccccaaagtcttaagtactagtagcctgttattgactgggagcctgactgatgtattatatatattgtatactgtattcttaaagtaagctagagaaaagaaaatgttacttagaaaatcataaggaagagaaaatatatttactgtgtttatcaatact

SEQ ID NO: 261 - DNA, 1303 bp, Homo sapiens
  brix domain containing 2 (BRIX1, BXDC2), ribosome biogenesis protein BRX1 homolog, BRX1, biogenesis of ribosomes, homolog (S. cerevisiae)
  CDS (25)...(1086): BRIX1
caagagcgcgggcggcgaggcaagatggcggcaaccaagaggaaacggcgtggaggctttgcagttcaggcgaagaagccaaaaagaaacgaaatagatgcggagccgccagctaagcggcacgccacagcagaggaggtggaggaagaagagagggaccggatcccaggccccgtttgcaagggaaagtggaaaaataaggaacggattctcatcttttcttccagaggaataaattttagaacaagacatttaatgcaggacttgagaatgttgatgcctcattctaaagcagatactaaaatggatcgtaaggataagctatttgtgattaacgaggtttgtgaaatgaagaactgtaataaatgcatctattttgaagctaagaaaaaacaggatctctatatgtggctttcaaattcacctcacggaccatctgctaaattccttgttcaaaatattcataccctcgctgaactgaagatgactggaaactgtttgaaaggttctcggccccttttgtcttttgaccctgcttttgatgaattaccacattatgctttgttaaaagaactcttaattcagatctttagtacaccacggtatcatcccaaaagccaaccatttgtggaccacgtgtttactttcaccattttggataataggatatggtttcggaactttcagatcatagaagaagatgctgctcttgtagaaataggacctcgttttgtcttaaatctcataaagattttccagggaagttttggaggaccaactttatatgaaaatcctcactaccagtcaccaaacatgcatcggcgtgtcataagatccatcacagctgcaaaatacagagagaaacagcaagtgaaagatgtgcaaaaactgagaaagaaagagccgaagactcttcttccacatgatcccactgcagatgtttttgtaacaccagctgaggagaaaccaatagaaatacagtgggtaaaaccagagccaaaagttgatttgaaagcaagaaagaaacggatttacaaaaggcaaagaaaaatgaaacagaggatggacagtgggaaaacaaaataagtcaatggaaacctgatttgtttttcagttactttatatttattttgtattcaatgtgtaaatacttttattatctaatactatcttacgtctaattagtgtagcatttacaagaaagaaaaattaagatcttaaaatcagtgattatctttttctaaataaaatatcaccagaattcatcagttaaaaaaaaaaaaaaaaaaaaaaaaaaaaaaaa

SEQ ID NO: 262 - DNA, 3286 bp, Homo sapiens
  CD3e antigen, epsilon polypeptide associated protein (CD3EAP), antisense to ERCC-1 protein (ASE-1, ASE1), DNA-directed RNA polymerase I subunit RPA34m, polymerase I-associated factor PAF49, CAST
  CDS (489)...(2021): CD3EAP
aagttctgaacttgtgaggcatctgggcctccccagaagacatttaacacagaaagcacagccctactaactagtattcttacctgtctcttcaagaatttcagaccaatcgaccgtcctgtctctttaaggcttaggaagagcagtgtggctgcccctttaaggaggcgttgcaacaaaccatattggacagacgatgggggcgacccatcgggacccgacgggcctctgactccagcaatacagcgaatcagcggctttcgggaatacatttttcggaaaaagacttcttcctcggttttctgctctgcacacgttgaaattttccccagtttttcctgcagatcgggagtcgagcaatgcctacccccgcgctcccgcaccagttgggcgctcccggatgatgccctacccctttggatccacgtggtctgcaacctggtgcgagcagcccgggctacagggttgcctgaggtgtgggtcccaggatggaggagccccaggccggcgatgctgctcggttctcttgtccccccaactttaccgcgaagcccccagcctcagagtcccctcgtttctccttggaggcgctgacgggtccagatacggagctgtggcttattcaggcccctgcagactttgccccagaatgcttcaatgggcggcatgtgcctctctctggctcccagatcgtcaagggcaaattggcaggcaagcggcaccgctatcgagtcctcagcagctgtccccaagctggagaagcgaccctgctggccccctcaacggaggcaggaggtggactcacctgtgcctcagccccccagggcaccctaaggatccttgagggtccccagcaatccctgtcagggagccctctgcagcccatcccagcaagtcccccaccacagatccctcctggcctgaggcctcggttctgtgcctttgggggcaacccaccagtcacagggcctaggtcagccttggcccccaacctgctcacctcagggaagaagaaaaaggagatgcaggtgacagaggccccagtcactcaggaggcagtgaatgggcacggggccctggaggtggacatggctttggggtcgccagaaatggatgtgcggaagaagaagaagaaaaaaaatcagcagctgaaagaaccagaggcagcagggcctgtggggacagagcccacagtggagacactggagcctctgggagtgctgttcccgtccaccaccaagaagaggaagaagcccaaagggaaagaaaccttcgagccagaagacaagacagtgaagcaggaacagattaacactgagcctctagaagacacagtcctgtccccgaccaaaaagagaaagaggcaaaaggggacggaagggatggagccagaggagggggtgacagttgagtctcagccacaggtgaaggtggagccactggaggaagccatccctctgccccctacgaagaagaggaaaaaagaaaagggacagatggcaatgatggagccagggacggaggcgatggagccagtggagccggagatgaagcctctggagtccccaggggggaccatggcgcctcaacagccagaaggagcgaagcctcaggcccaggcagctctggcagctcccaaaaagaagacgaagaaagaaaaacagcaagatgccacagtggagccagagacagaggtggtggggcctgagctgccggatgaccttgagcctcaggcagctcccacatccaccaagaagaagaagaagaagaaagagagaggtcacacagtgactgagccaattcagccactagagcctgaactgccaggggagggacagcctgaagccagggcaactccgggatccaccaagaagaggaagaagcagagtcaggaaagccggatgccagagacagtgccccaagaggagatgccagggccgccactgaattcagagtctggggaggaggctcccacaggccgggacaagaagcggaagcagcagcagcagcagcctgtgtagtctgcccccgggaaactgaggaactaaagaaagctgaaggtgcccacctgggccaccagaaggtgacacccccagaatccctccccagagactgcaccagcgcagccagcaggagcctggcctgggaggacgatttattattacactgggggtttccttggcagctggggtcatcagggtactttcaagaagggctcgtgcaggacatcaaacagcctccgggcctggatgggagggagaaaaaaatgaggaaccagtcattaaaggagctgtttcctgggtaaatctagagtggggttttggttctttattttcccctataccctcaagcatttatccattgagttacaaacaatccagttacaatctttttaagttattattattattattattttttttttttttgagatggagtctcgctctgtcgcccaggttggagtgcagtggcgcaatctcggctcactgcaagctccgcctcccgggttcacgccattctcctgcctcagcctcctgagtagctgggactacaggcccctgcccagctaattttttgtatttttttttagtagagatggggtttcaccacgttagccaggatggtctcgatctcctgacctcctgatgcgcctgcctcagcctcccagtgctgggattataggtgtgagccactgcgcctggctaagttattattatttttttgagacagtctcctggtgtcacccaggctggagtgcagtggtgtgatcttggctcactgcaacctccgcctcctgggttccaacgattctcctgcctcagcctcccgagtagctgggcctaaaggtgcccaccactatacccggctaatttttgtatttttagtagagacaggggtttcaccatattggccaggctggtctcgaactcctgacctcgtgatccacctgccttgacctcccaaagtgctaggataacaggtgtgagccaccgcaccctgccaagttattttaaaatgtaccattattattgactatagtcacctggttgtgttatcaaatagtatgtcttattcattctttctttgtgtgtgtgtgtgtgtgtgtgtgtgtgtgtggtacccattaaccttccccatctccctgccagcccctaactaccctccccagcctccaggaactatccatccactcttatctccatgagttcaattgttttgatttttagatacacaaataaataagaacatgcaatgtttgtctttctgtgcctggcttatttcactt

SEQ ID NO: 263 - DNA, 3136 bp, Homo sapiens
  early growth response 1 (EGR1), transcription factor ETR103, transcription factor Zif268, nerve growth factor-induced protein A (NGFI-A), zinc finger protein 225 (ZNF225), zinc finger protein Krox-24 (KROX-24), AT225, G0S30, TIS8
  CDS (271)...(1902): EGR1
gcgcagaacttggggagccgccgccgccatccgccgccgcagccagcttccgccgccgcaggaccggcccctgccccagcctccgcagccgcggcgcgtccacgcccgcccgcgcccagggcgagtcggggtcgccgcctgcacgcttctcagtgttccccgcgccccgcatgtaacccggccaggcccccgcaactgtgtcccctgcagctccagccccgggctgcacccccccgccccgacaccagctctccagcctgctcgtccaggatggccgcggccaaggccgagatgcagctgatgtccccgctgcagatctctgacccgttcggatcctttcctcactcgcccaccatggacaactaccctaagctggaggagatgatgctgctgagcaacggggctccccagttcctcggcgccgccggggccccagagggcagcggcagcaacagcagcagcagcagcagcgggggcggtggaggcggcgggggcggcagcaacagcagcagcagcagcagcaccttcaaccctcaggcggacacgggcgagcagccctacgagcacctgaccgcagagtcttttcctgacatctctctgaacaacgagaaggtgctggtggagaccagttaccccagccaaaccactcgactgccccccatcacctatactggccgcttttccctggagcctgcacccaacagtggcaacaccttgtggcccgagcccctcttcagcttggtcagtggcctagtgagcatgaccaacccaccggcctcctcgtcctcagcaccatctccagcggcctcctccgcctccgcctcccagagcccacccctgagctgcgcagtgccatccaacgacagcagtcccatttactcagcggcacccaccttccccacgccgaacactgacattttccctgagccacaaagccaggccttcccgggctcggcagggacagcgctccagtacccgcctcctgcctaccctgccgccaagggtggcttccaggttcccatgatccccgactacctgtttccacagcagcagggggatctgggcctgggcaccccagaccagaagcccttccagggcctggagagccgcacccagcagccttcgctaacccctctgtctactattaaggcctttgccactcagtcgggctcccaggacctgaaggccctcaataccagctaccagtcccagctcatcaaacccagccgcatgcgcaagtaccccaaccggcccagcaagacgcccccccacgaacgcccttacgcttgcccagtggagtcctgtgatcgccgcttctcccgctccgacgagctcacccgccacatccgcatccacacaggccagaagcccttccagtgccgcatctgcatgcgcaacttcagccgcagcgaccacctcaccacccacatccgcacccacacaggcgaaaagcccttcgcctgcgacatctgtggaagaaagtttgccaggagcgatgaacgcaagaggcataccaagatccacttgcggcagaaggacaagaaagcagacaaaagtgttgtggcctcttcggccacctcctctctctcttcctacccgtccccggttgctacctcttacccgtccccggttactacctcttatccatccccggccaccacctcatacccatcccctgtgcccacctccttctcctctcccggctcctcgacctacccatcccctgtgcacagtggcttcccctccccgtcggtggccaccacgtactcctctgttccccctgctttcccggcccaggtcagcagcttcccttcctcagctgtcaccaactccttcagcgcctccacagggctttcggacatgacagcaaccttttctcccaggacaattgaaatttgctaaagggaaaggggaaagaaagggaaaagggagaaaaagaaacacaagagacttaaaggacaggaggaggagatggccataggagaggagggttcctcttaggtcagatggaggttctcagagccaagtcctccctctctactggagtggaaggtctattggccaacaatcctttctgcccacttccccttccccaattactattccctttgacttcagctgcctgaaacagccatgtccaagttcttcacctctatccaaagaacttgatttgcatggattttggataaatcatttcagtatcatctccatcatatgcctgaccccttgctcccttcaatgctagaaaatcgagttggcaaaatggggtttgggcccctcagagccctgccctgcacccttgtacagtgtctgtgccatggatttcgtttttcttggggtactcttgatgtgaagataatttgcatattctattgtattatttggagttaggtcctcacttgggggaaaaaaaaaaaagaaaagccaagcaaaccaatggtgatcctctattttgtgatgatgctgtgacaataagtttgaacctttttttttgaaacagcagtcccagtattctcagagcatgtgtcagagtgttgttccgttaacctttttgtaaatactgcttgaccgtactctcacatgtggcaaaatatggtttggtttttctttttttttttttttgaaagtgttttttcttcgtccttttggtttaaaaagtttcacgtcttggtgccttttgtgtgatgcgccttgctgatggcttgacatgtgcaattgtgagggacatgctcacctctagccttaaggggggcagggagtgatgatttgggggaggctttgggagcaaaataaggaagagggctgagctgagcttcggttctccagaatgtaagaaaacaaaatctaaaacaaaatctgaactctcaaaagtctatttttttaactgaaaatgtaaatttataaatatattcaggagttggaatgttgtagttacctactgagtaggcggcgatttttgtatgttatgaacatgcagttcattattttgtggttctattttactttgtacttgtgtttgcttaaacaaagtgactgtttggcttataaacacattgaatgcgctttattgcccatgggatatgtggtgtatatccttccaaaaaattaaaacgaaaataaagtagctgcgattggg

SEQ ID NO: 264 - DNA, 937 bp, Homo sapiens
  pleckstrin homology-like domain, family A, member 2 (PHLDA2), tumor suppressing subchromosomal transferable fragment cDNA 3 (TSSC3), Beckwith-Wiedemann syndrome chromosomal region 1 candidate gene C protein (BWR1C), HLDA2, IPL
  CDS (57)...(515): PHLDA2
agagccggcgccgtcaccgcccgcattgccgctcccagtcccgcgctcggcacgacatgaaatcccccgacgaggtgctacgcgagggcgagttggagaagcgcagcgacagcctcttccagctatggaagaagaagcgcggggtgctcacctccgaccgcctgagcctgttccccgccagcccccgcgcgcgccccaaggagctgcgcttccactccatcctcaaggtggactgcgtggagcgcacgggcaagtacgtgtacttcaccatcgtcaccaccgaccacaaggagatcgacttccgctgcgcgggcgagagctgctggaacgcggccatcgcgctggcgctcatcgatttccagaaccgccgcgccctgcaggactttcgcagccgccaggaacgcaccgcacccgccgcacccgccgaggacgccgtggctgccgcggccgccgcaccctccgagccctcggagccctccaggccatccccgcagcccaaaccccgcacgccatgagcccgccgcgggccatacgctggacgagtcggaccgaggctaggacgtggccggcgctctccagccctgcagcagaagaacttcccgtgcgcgcggatcctcgctccgttgcacgggcgccttaagttattggactatctaatatctatgtatttatttcgctggttctttgtagtcacatattttatagtcttaatatcttgtttttgcatcactgtgcccattgcaaataaatcacttggccagtttgcttttctaccatccggctgtggctcagtgagactcctgctgggagggtggaggcccaggaatgggcgggcaggacaccctcatccagtcctgcggggctggtgtgaaaggcgctgggaaccggctttgaatgaataaatgaatcgtgtcatctgcaaaaaaaaaaaaaaaaa

SEQ ID NO: 265 - DNA, 2223 bp, Homo sapiens
  AT rich interactive domain 5A (MRF1-like), ARID domain-containing protein 5A (ARID5A), modulator recognition factor 1 (MRF-1, MRF1), RFVG5814, RP11-363D14
  CDS (101)...(1885): ARID5A
ccggcgggccgcgccgcgagccagtatctcagagagcgcggggtccggacagccgcgcgctgagggtctcggggcgggcgccgcgggacctctccgggccatggcagcccctgtcaaagggaacaggaagcagtccacggagggtgacgccctagacccacctgcatcccccaaacctgctggcaagcagaacggaatccagaaccccatctcgctggaggactcccccgaggcaggcggggagcgggaggaggagcaggagcgggaggaggagcaggccttcctggtcagcctctacaagttcatgaaggagcgacacacgcccatcgagagggtgccccatctcggcttcaagcagattaacctgtggaagatctacaaagcagtggagaagctgggggcctatgagctggtgaccgggcgccgcctctggaagaacgtgtacgacgagctggggggcagcccaggcagcaccagcgcggccacgtgcacgcgccgccactacgagaggctggtcctgccatacgtgcggcacctgaagggggaggatgacaagccgctgcccacctccaagcccaggaaacagtacaagatggctaaggagaacaggggggatgatggggccaccgagaggccgaagaaggccaaggaggagcggcgcatggaccagatgatgccaggaaagaccaaagcagatgctgctgacccagcaccacttcccagccaggagccccccaggaacagcacagaacagcagggcctggcctctgggtcttctgtgtcctttgtgggtgccagcggctgtcctgaggcctacaagcggctcctatccagcttctactgcaaggggacacacggcatcatgtcaccactggccaaaaagaagctcctggcccaggtgagcaaggtggaggccttgcagtgccaggaggagggctgccgccatggggcagagccccaggcgtccccagctgttcacctcccagagagtccccagagccccaaagggctgactgagaactccaggcaccggctgacccctcaggagggattgcaggccccaggtggcagcctcagagaggaggcgcaggcaggcccctgcccggcagcccccatcttcaagggctgcttctacacccaccccaccgaggtgctgaagcctgtcagccagcaccccagggacttcttctctagacttaaagatggggtgctattggggcctcctggcaaagaggggctgtcagtgaaagagccccagctggtgtggggcggagacgctaaccgcccttctgcgttccataaaggtggctccagaaagggcatcctctaccccaagcccaaagcctgctgggtgtcccccatggccaaggtcccagccgagagccccacgctcccgcccaccttccccagtagcccaggcctgggcagcaagcgcagcctggaggaagagggtgctgcccacagtgggaagagactgcgggccgtgtctccctttcttaaggaggcggatgccaagaagtgtggggccaaacctgcagggtccggcctggtctcctgccttctgggcccagccctggggcctgtgcccccagaggcctacaggggcaccatgctgcactgcccgctgaacttcactggcaccccgggccccttgaagggccaggctgcactccccttcagccccctggtcatcccggccttcccggcccacttcctggccaccgcaggcccctcgcccatggccgctggcctgatgcacttccccccaacgtccttcgacagtgccctccgccacagactttgcccggcctcatctgcctggcacgcaccaccagtcacaacctatgcagcgccccacttcttccacctcaacaccaagctgtaggccagcccatggtgttgtgtacactgtggagtcgacaggggcctacaacaggcaggtactgctgccagggggctctgaactagtgcctgctacccaggacacccgggccatgcccctggctgggcagcctggcacaagtgaagaagaaggcagtgggaaaactgggtttatctcaaggcagcagcctgagcccaggagcagaggacccagttgttataaggcgctgggagaggatgggcagctcccactgccccagagcggagctcgaagcacccaggttgcccacggaaaatccaataaaaagacaccagtgtgaatccaaaaaaaaaaaaaaaaaa

SEQ ID NO: 266 - DNA, 2842 bp, Homo sapiens
  dual specificity phosphatase 6 transcript variant 1 (DUSP6), serine/threonine specific protein phosphatase, mitogen-activated protein kinase phosphatase 3 (MKP3), dual specificity protein phosphatase PYST1, HH19
  CDS (481)...(1626): DUSP6
gagacgctcgctgtttgtatccattgaggagctgcctcgcgcagggggtgtgcgaggctgagtccaagagatagcaaatcgagtcttaaataatccggggagaaagacgcccgggtagatttgaggtgcagccttggagggagggattagaagccgctagactttttttcctcccctctcagtagcacggagtccgaattaattggatttcattcactggggaggaacaaaaactatctgggcagcttcattgagagagattcattgacactaagagccagcggctgcagctgggtgcagagagaacctccggctttacttctgtctcgtctgccccaaccgctagcctcggcttgggtaaggcgaggcggaattaaaccccgctccgagagcggcagcttcgcgcgcggtgcgctcggcctatgcctgccccgaggggcgtctggtaggcaccccgccctctcccgcagctcgacccccatgatagatacgctcagacccgtgcccttcgcgtcggaaatggcgatcagcaagacggtggcgtggctcaacgagcagctggagctgggcaacgagcggctgctgctgatggactgccggccgcaggagctatacgagtcgtcgcacatcgagtcggccatcaacgtggccatcccgggcatcatgctgcggcgcctgcagaagggtaacctgccggtgcgcgcgctcttcacgcgcggcgaggaccgggaccgcttcacccggcgctgtggcaccgacacagtggtgctctacgacgagagcagcagcgactggaacgagaatacgggcggcgagtcggtgctcgggctgctgctcaagaagctcaaggacgagggctgccgggcgttctacctggaaggtggcttcagtaagttccaagccgagttctccctgcattgcgagaccaatctagacggctcgtgtagcagcagctcgccgccgttgccagtgctggggctcgggggcctgcggatcagctctgactcttcctcggacatcgagtctgaccttgaccgagaccccaatagtgcaacagactcggatggtagtccgctgtccaacagccagccttccttcccagtggagatcttgcccttcctctacttgggctgtgccaaagactccaccaacttggacgtgttggaggaattcggcatcaagtacatcttgaacgtcacccccaatttgccgaatctctttgagaacgcaggagagtttaaatacaagcaaatccccatctcggatcactggagccaaaacctgtcccagtttttccctgaggccatttctttcatagatgaagcccggggcaagaactgtggtgtcttggtacattgcttggctggcattagccgctcagtcactgtgactgtggcttaccttatgcagaagctcaatctgtcgatgaacgatgcctatgacattgtcaaaatgaaaaaatccaacatatcccctaacttcaacttcatgggtcagctgctggacttcgagaggacgctgggactcagcagcccatgtgacaacagggttccagcacagcagctgtattttaccaccccttccaaccagaatgtataccaggtggactctctgcaatctacgtgaaagaccccacacccctccttgctggaatgtgtctggcccttcagcagtttctcttggcagcatcagctgggctgctttctttgtgtgtggccccaggtgtcaaaatgacaccagctgtctgtactagacaaggttaccaagtgcggaattggttaatactaacagagagatttgctccattctctttggaataacaggacatgctgtatagatacaggcagtaggtttgctctgtacccatgtgtacagcctacccatgcagggactgggattcgaggacttccaggcgcatagggtagaaccaaatgatagggtaggagcatgtgttctttagggccttgtaaggctgtttccttttgcatctggaactgactatataattgtcttcaatgaagactaattcaattttgcatatagaggagccaaagagagatttcagctctgtatttgtggtatcagtttggaaaaaaaaatctgatactccatttgattattgtaaatatttgatcttgaatcacttgacagtgtttgtttgaattgtgtttgttttttcctttgatgggcttaaaagaaattatccaaagggagaaagagcagtatgccacttcttaaaacagaacaaaacaaaaaaagaaaattgtgctcttttctaatccaaagggtatatttgcagcatgcttgactttaccaattctgatgacatctttacggacactattatcactaagaccttgttatggcgaagtctttagtctttttcatgtattttcctcatgattttttctctttatgtagtttgactatgccttacctttgtaaatatttttgcttgtgttgtcgcaaaggggataatctgggaaagacaccaaatcatgggctcactttaaaaaaagaaagaataaaaaaaccttcagctgtgctaaacagtatattacctctgtataaaattcttcagggagtgtcacctcaaatgcaatactttgggttggtttctttcctttaaaaaaatttgtataaaactggaagtgtgtgtgtgtgagcatgggtacccatttgataagagaaatgcatttgattgtgaagaagggagagttaaattctccattatgttcgtggtgtaaagtttagagctggaatttattataagaatgtaaaaccttaaattattaataaataactattttggctattgaaaaaaaaaaaaaaaaaaaaaaaa

SEQ ID NO: 267 - DNA, 2126 bp, Homo sapiens
  sprouty homolog 2 (Drosophila) (SPRY2, spry-2, hSPRY2)
  CDS (382)...(1329): SPRY2
gtaaggccgttttcttttcccattcgctcatctgccaggaaaagggacttgccgttggcgcttcggcctcttgttcattgagaaaaaagaggaaatactccgcgtgcgcttgtagaaggggagtcgtctccagctccgaaccccggagtgttcatcagcggggaatctggctccgaattctctttttttctcccgccgattgctcggaagttggtctaaagcagaggttggaaagaaaggaaaaaagtttgcatcgagactggatttatttgcacatcgcagaaagaagagaatccaagggagaggggttggtgcaaagccgcgatcacggagttcagatgtgttctaagcctgctggagtgaccacacttccaagacctgatggaggccagagctcagagtggcaacgggtcgcagcccttgctgcagacgccccgtgacggtggcagacagcgtggggagcccgaccccagagacgccctcacccagcaggtacatgtcttgtctctggatcagatcagagccatccgaaacaccaatgagtacacagaggggcctactgtcgtcccaagacctgggctcaagcctgctcctcgcccctccactcagcacaaacacgagagactccacggtctgcctgagcaccgccagcctcctaggctccagcactcgcaggtccattcttctgcacgagcccctctgtccagatccataagcacggtcagctcagggtcgcggagcagtacgaggacaagtaccagcagcagctcctctgaacagagactgctaggatcatccttctcctccgggcctgttgctgatggcataatccgggtgcaacccaaatctgagctcaagccaggtgagcttaagccactgagcaaggaagatttgggcctgcacgcctacaggtgtgaggactgtggcaagtgcaaatgtaaggagtgcacctacccaaggcctctgccatcagactggatctgcgacaagcagtgcctttgctcggcccagaacgtgattgactatgggacttgtgtatgctgtgtgaaaggtctcttctatcactgttctaatgatgatgaggacaactgtgctgacaacccatgttcttgcagccagtctcactgttgtacacgatggtcagccatgggtgtcatgtccctctttttgccttgtttatggtgttaccttccagccaagggttgccttaaattgtgccaggggtgttatgaccgggttaacaggcctggttgccgctgtaaaaactcaaacacagtttgctgcaaagttcccactgtcccccctaggaactttgaaaaaccaacatagcatcattaatcaggaatattacagtaatgaggattttttctttctttttttaatacacatatgcaaccaactaaacagttataatcttggcactgttaatagaaaggtgggatagtctttgctgtttgcggtgaaatgctttttgtccatgtgccgttttaactgatatgcttgttagaactcagctaatggagctcaaagtatgagatacagaacttggtgacccatgtattgcataagctaaagcaacacagacactcctaggcaaagtttttgtttgtgaatagtacttgcaaaacttgtaaattagcagatgacttttttccattgttttctccagagagaatgtgctatatttttgtatatacaataatatttgcaactgtgaaaaacaagttgtgccatactacatggcacagacacaaaatattatactaatatgttgtacattcggaagaatgtgaatcaatcagtatgtttttagattgtattttgccttacagaaagcctttattgtaagactctgatttccctttggacttcatgtatattgtacagttacagtaaaattcaacctttattttctaattttttcaacatattgtttagtgtaaagaatatttatttgaagttttattattttataaaaaagaatatttattttaagaggcatcttacaaattttgccccttttatgaggatgtgatagttgctgcaaatgaggggttacagatgcatatgtccaatataaaatagaaaatatattaacgtttgaaattaaaaaaaaaaaaaaaaaa

SEQ ID NO: 268 - DNA, 4720 bp, Homo sapiens
  DEAD (Asp-Glu-Ala-Asp) box polypeptide 21 transcript variant 1, DEAD (Asp-Glu-Ala-Asp) box helicase 21 (DDX21), RNA helicase II/Gu alpha (RH-II/GU, RH-II/GuA), nucleolar RNA helicase Gu, nucleolar RNA helicase II, gu-alpha (GUA), GURDB
  CDS (104)...(2455): DDX21
gctacgggaagtgacgagagccgggtggacccagggtggggaactacctcttcctctccacgcggttgagaagaccggtcggcctgggcaacctgcgctgaagatgccgggaaaactccgtagtgacgctggtttggaatcagacaccgcaatgaaaaaaggggagacactgcgaaagcaaaccgaggagaaagagaaaaaagagaagccaaaatctgataagactgaagagatagcagaagaggaagaaactgttttccccaaagctaaacaagttaaaaagaaagcagagccttctgaagttgacatgaattctcctaaatccaaaaaggcaaaaaagaaagaggagccatctcaaaatgacatttctcctaaaaccaaaagtttgagaaagaaaaaggagcccattgaaaagaaagtggtttcttctaaaaccaaaaaagtgacaaaaaatgaggagccttctgaggaagaaatagatgctcctaagcccaagaagatgaagaaagaaaaggaaatgaatggagaaactagagagaaaagccccaaactgaagaatggatttcctcatcctgaaccggactgtaaccccagtgaagctgccagtgaagaaagtaacagtgagatagagcaggaaatacctgtggaacaaaaagaaggcgctttctctaattttcccatatctgaagaaactattaaacttctcaaaggccgaggagtgaccttcctatttcctatacaagcaaagacattccatcatgtttacagcgggaaggacttaattgcacaggcacggacaggaactgggaagacattctcctttgccatccctttgattgagaaacttcatggggaactgcaagacaggaagagaggccgtgcccctcaggtactggttcttgcacctacaagagagttggcaaatcaagtaagcaaagacttcagtgacatcacaaaaaagctgtcagtggcttgtttttatggtggaactccctatggaggtcaatttgaacgcatgaggaatgggattgatatcctggttggaacaccaggtcgtatcaaagaccacatacagaatggcaaactagatctcaccaaacttaagcatgttgtcctggatgaagtggaccagatgttggatatgggatttgctgatcaagtggaagagattttaagtgtggcatacaagaaagattctgaagacaatccccaaacattgcttttttctgcaacttgccctcattgggtatttaatgttgccaagaaatacatgaaatctacatatgaacaggtggacctgattggtaaaaagactcagaaaacggcaataactgtggagcatctggctattaagtgccactggactcagagggcagcagttattggggatgtcatccgagtatatagtggtcatcaaggacgcactatcatcttttgtgaaaccaagaaagaagcccaggagctgtcccagaattcagctataaagcaggatgctcagtccttgcatggagacattccacagaagcaaagggaaatcaccctgaaaggttttagaaatggtagttttggagttttggtggcaaccaatgttgctgcacgtgggttagacatccctgaggttgatttggttatacaaagctctccaccaaaggatgtagagtcctacattcatcgatccgggcggacaggcagagctggaaggacgggggtgtgcatctgcttttatcagcacaaggaagaatatcagttagtacaagtggagcaaaaagcgggaattaagttcaaacgaataggtgttccttctgcaacagaaataataaaagcttccagcaaagatgccatcaggcttttggattccgtgcctcccactgccattagtcacttcaaacaatcagctgagaagctgatagaggagaagggagctgtggaagctctggcagcagcactggcccatatttcaggtgccacgtccgtagaccagcgctccttgatcaactcaaatgtgggttttgtgaccatgatcttgcagtgctcaattgaaatgccaaatattagttatgcttggaaagaacttaaagagcagctgggcgaggagattgattccaaagtgaagggaatggtttttctcaaaggaaagctgggtgtttgctttgatgtacctaccgcatcagtaacagaaatacaggagaaatggcatgattcacgacgctggcagctctctgtggccacagagcaaccagaactggaaggaccacgggaaggatatggaggcttcaggggacagcgggaaggcagtcgaggcttcaggggacagcgggacggaaacagaagattcagaggacagcgggaaggcagtagaggcccgagaggacagcgatcaggaggtggcaacaaaagtaacagatcccaaaacaaaggccagaagcggagtttcagtaaagcatttggtcaataattagaaatagaagatttatatagcaaaaagagaatgatgtttggcaatatagaactgaacattatttttcatgcaaagttaaaagcacattgtgcctccttttgaccacttgccaagtccctgtctctttcagacacagacaagcttcatttaaattatttcatctgatcattatcatttataactttattgttacttcttcatcagtttttccttttgaaaggtgtatgaattcattacatttttattctaatgtattatctgtagattagaagataaaatcaagcatgtatctgcctatactttgtgagttcacctgtctttatactcaaaagtgtcccttaatagtgtccttccctgaaataaatacctaagggagtgtaacagtctctggaggaccactttgagcctttggaagttaaggtttcctcagccacctgccgaacagtttctcatgtggtcctattatttgtctactgagacttaatactgagcaatgttttgaaacaagatttcaaactaatctgggttgtaatacagtttataccagtgtatgctctagacttggaagatgtagtatgtttgatgtggattacctatacttatgttcgttttgatacatttttagcttctcattataaggtgattcatgctttagtgaattcttcatagatagtatatataaaagtacattttaatagaaagccagggttttaaggaatttcacatgtataaggtggctccatagctttatttgtaagtaggctggataaatggtgcttaaatggtaatgtactccacttcttcctattggaagattaacattatttaccaagaaggacttaagggagtagggggcgcagattagcattgctcaagagtatgtaaaaaaaaaaaaaaaaaaaaagaaccaaaccactggaaataatcaaatgcaaaaaggtaacaaattcataactggaaagcaaagagaagaacaagtatgatttggatgataaagcattgttttaatggtgaaaacttcacagatcactaatgtttctagaggttaacttcaagtgggcaagctggggtttttaggtagtcagtggcctagttcctaaagccacagtataggatctgttaaactgaatgtctgttgaaagtttgttttagctgcttggaggcttccttttaagacaaactgtatgtgattaagttgttttgagggaactgaagaacctgatgtagcccctggccagataactgcctgatttctcagatattatttctctgggaaacattctacatagcacaggagcttaagagtggcattatcttctcgccttaatttccagagattatttctgtactgagaatcctggaactactatgctaggaaatttaaagctgcatggtctgtcttgttttcatttaattattgtgaatacctagaatctttcttggtcctgatttctcttgcttaatccagtctttatctctaactgccccttatttgatcaccatgtactaggagctctgatagccagctcagctcctaatccttgaggcaacattctttttctatttgaacttcagttctgtccttgaatcccgactagatatttcttgccctctggtctcagaattctcttggcttttattccttgatccacttgccagttttatcactttacccttgttcctcatggcttcccatcaagccatgggtattaggtgacagtgtaatttattagattctggttttgcccaaatactgggcatgctttaataataactgaaccatttcattatttggataggcatgggtaccttatcaagcagattaaaaggatatggtacccgtcctttagaaaagaacagctaaaaccttgttgtggattatggatttagcctaaagaaaaataatctggcataaattaagagtaagagagaagattaatagaaatttcacttcacataacttaaaacatggctatttcaataaaggactaaagtttctcctggatcccagaattcaacctgtatttataaatgtataatgtatttagctactttttggtttaaatgaacttgttgggttagcttggtaaatgttataatttttactattttctacaaagaaaatattttctaatttaagttggagctatctgtgcagcagtttctctacagttgtgcataaatgtttttactataaaatgagctaatgtataaaatactgctgtataccataataaagatagtaatacttgataaaaaaaa

SEQ ID NO: 269 - DNA, 2537 bp, Homo sapiens
  GTP binding protein 4 (GTPBP4), G protein-binding protein CRFG, G protein-binding protein NGB, chronic renal failure gene protein (CRFG), NOG1
  CDS (72)...(1976): GTPBP4
ggaagtcccacctgcgcccgacggcggaagttccgggagtgccaagtacccgcgtgcatacggctgccggcatggcacattacaacttcaagaaaattacggtggtgccgtccgccaaggacttcatagacctcacgttgtcgaagactcaacgaaagactccaaccgttattcataaacattaccaaatacatcgcattagacatttttacatgagaaaagtcaaatttactcaacagaattaccatgatagactttcacaaattctaacagatttccccaaattggatgatattcatccgttctatgctgatttgatgaatattctctacgacaaggatcattacaagttggctctggggcaaataaatattgccaaaaatttagtggacaatgttgctaaagattatgtgcgactgatgaagtatggcgactctctctaccgctgcaaacagctgaagcgtgcggccctgggacggatgtgcacagtgatcaagaggcagaagcagagtttggagtatttggagcaagtgcgtcagcatttatcccgtttgccaaccattgatccgaataccaggaccctgcttttgtgtgggtacccaaatgttgggaagtccagcttcatcaacaaggtgacgagagcagacgtggatgtccagccctatgcgttcacaaccaagtctctgtttgttgggcacatggattataagtatctacgttggcaggttgtagacactcctgggatcctggaccaccctctggaggataggaacaccatcgagatgcaggccatcactgccctggcccacctccgtgctgcggtcctgtatgtgatggatttgtctgagcagtgtgggcatgggctgagggagcagctagaactcttccagaacatcagacctctcttcatcaacaagcctctcatagttgtagccaacaaatgtgatgtgaagagaatagctgaactttctgaagatgatcagaaaatatttacagatttgcagtctgaaggattccctgtaatagagaccagcaccctgactgaggaaggtgttattaaagttaaaacagaggcttgcgataggcttttggctcatcgagtggaaaccaaaatgaagggaaataaagtgaatgaggtgctgaatagactgcacctggctatcccaaccaggagggacgataaggagaggccccctttcatccctgaaggagtggtggctcgcaggaagaggatggaaactgaggagtccaggaagaagagggaacgagatcttgagctggaaatgggagatgattatattttggatcttcagaagtactgggatttaatgaatttgtctgaaaaacatgataagataccagaaatctgggaaggccataatatagctgattatattgatccagccatcatgaagaaattggaagaattagaaaaagaagaagagctgagaacagctgctggagagtatgacagtgtatctgagagtgaagacgaagagatgctggaaatccgacagctggcaaagcaaattcgagagaaaaagaagttgaaaattctggagtccaaagaaaagaatacacagggacccaggatgccgcgaactgctaagaaggttcagaggacagttttggagaaggagatgcgtagtcttggtgttgacatggacgataaagacgatgcccattacgcagtccaggcaagaagatcccggagcatcactaggaaaagaaagcgggaagactctgctcccccgtcctctgtggcccggagtgggagttgctctcgaactccacgtgacgtttctggtcttagggatgtcaagatggtgaagaaagccaagactatgatgaagaatgctcagaagaagatgaatcggttggggaagaaaggggaggcggatagacacgtgtttgatatgaagcccaagcacttgctgtctgggaagaggaaagctggtaaaaaggacaggagatagtatccgtttggttggcgtggcttcgctagagtgttgctgtttatttcctggtttggcacagtatggtttcatgaaattggagctctgtataaactgaaaaagacaaaataagtaaagcacttgttgctttgctgaaaactatggttaaccctatataggtgtgggaaatttttgtcactgcataatattacaaatattttgagtagacagtgtttccacatttaatggagtatcagttgcttcagattttcagaactgggaagatttactggtgtaactgggttgtttttgatggagaaaaaccttattttcttttgtaagagctgggagcaaacacgtttatgagtgtgtcggaatcccgtgcttaaaatacgctcttaaattattttctagtcttattttacaatgtctcattgtagtctgtcttcaactattttatccaaaataaacctccagaagaaagtagttttcatttacttagctcatgttttggtttagttatagtcgctatggatttggccaaataaaaaggcaaacaacaaaaaaaaaaaaaaaaaaaaa

SEQ ID NO: 270 - DNA, 3713 bp, Homo sapiens
  phosphoribosyl pyrophosphate amidotransferase (PPAT), glutamine phosphoribosylpyrophosphate amidotransferase (GPAT), amidophosphoribosyltransferase (ATASE), amidophosphoribosyltransferase proprotein
  CDS (160)...(1713): PPAT
agggacagcgcgcgccgccgcagtagctggggccaccctcgggaaggaagagcctgtcgcgagcgcgagcttctgagctcgacgggccgagctggcagctggttggtgcttacaccttggccgcagcggcaggtccttccacgtgctttcggcggcgacatggagctggaggagttggggatccgagaggaatgtggcgtgttcgggtgcatcgcctcaggagagtggcccacgcagctggatgtaccgcatgtgatcactctgggactcgtggggctgcagcaccggggtcaggagagtgctggtattgtgactagtgatgggagttcggtgccaacattcaaatcacacaagggaatgggtcttgtaaatcacgtctttactgaagacaatttgaaaaaattatatgtttcaaatcttggaattggacacaccaggtatgccaccacaggaaaatgtgaactagaaaattgtcagcccttcgttgttgaaacacttcatgggaagatagctgtggcacataatggcgaattggtaaatgctgctcgattaaggaaaaagcttctgcgtcatggtattggtctgtctacaagttctgatagtgaaatgattacccagttactggcgtatacccctcctcaggaacaagatgacaccccagactgggtagccaggattaaaaacttgatgaaggaagcacccacagcatactccctgcttataatgcacagagatgttatttatgcagtacgagatccttatggaaatcgtcccttatgcattggtcgtcttattccagtgtctgatataaatgacaaagagaaaaaaacatcagaaacagaaggatgggtggtgtcttcagaatcttgtagcttcttatctattggtgcaagatattaccgtgaagtcttgcctggagaaattgtggaaatatccagacacaatgtccaaactcttgatattatatcaaggtctgaaggaaacccagtggctttttgtatctttgaatatgtttattttgcaagaccagacagtatgttcgaagaccaaatggtttatacagtaagataccgttgtggccagcagctagcgattgaagcacctgtggatgcagatttggttagcactgttccagaatctgctacgcctgctgctcttgcttacgcaggaaagtgtggacttccatatgtggaggtgctgtgtaaaaaccggtatgtagggagaaccttcattcagccaaacatgaggttaagacaacttggtgttgcaaaaaaatttggagtattgtcagacaactttaaaggcaaaagaattgttcttgtagatgattcaattgtcagaggcaataccatctcacctataataaaactgctcaaagaatctggtgcaaaagaggtacacattcgagtagcttcaccaccaattaaatatccatgcttcatgggaataaacattcctacaaaagaagagctcattgccaataaaccagaatttgatcaccttgcagaatatctaggagcaaacagtgttgtgtatctgtcagtagaaggactggtttcatctgtacaagaagggataaagtttaaaaaacagaaagagaaaaagcacgatattatgatccaagaaaatggaaatggtctggaatgttttgaaaagagtggtcattgtacagcttgtctcactggaaaatatcctgtagaattagaatggtagctggtagggttggatgtgtgtagtttcaagatagaaagttggtcaagaagttatagtggtcacacctcatctatttactgttactcagttggtacaatgtaaaatgccatgcttatgtttataagttttgagattttttttttttctgaaaaggataccaaagtgcgataactgaacatttccaattgcatataatacaacaatatgtggtgttcttttttttacacaagcattggctagcctttttaacctggtcagagaaggcaggtggtcactgacatttcccaagtccatgctttaaagggtttgcaagaagttagggttaaggagaggtgatgccaacaagacaggtgagttaaatataccatttcacacaaagtttgaatagaatacattatacctcataggtgtctagcctctacagttctggctgtagttatgaccttggcttccctgtctaactgtagacaaatctttaaaaaaaaataataataatctggtgcctcagtttccccacatgtgcaatgggatacttattaaataattaataagaatgtgaataagtgtcatacttttgtgatttgagccatcatttcacttctgattttaagacaactcatgattgttagctttcagaaagctaatgattgttaactttttgaaattagtttacaattaattaagatttcattatgatggaaggagacataattggcagatctttgccatctctctttgagatgtcctaaaaagggttgtaaaaatctgtgaaaaagtttttcctacatttgactagaaaatgtgatccatagtatttagtgccctgatactataagctcagcaagtaacctggtacatttgaaataaaaaccaaatttttagattcaaacaatccctttatccttaatttaattaattatcatatgctttttttaatgaagtgcttgatcacttgcaaacatatatacatgtagatgtacatatacatgtacacatacacataaatattattgcaattaagtgatcaagtacagacacaataggggccagttttgtttaaggatcaaagagacaaccactttggggaattagtatcaacttacaatccaagtccaagtatcatcttataatcacttttttctactatattaagatctaatgaatttgatttcttttttgaagttttttcttgtaacatctgagattagaagtttaagatgacttgaccccaaacctttgtttatgtaagaatttttaaacataaaagtgtttgtttctgttatgttaccataatttgatgtatatagtgtccagatccatttagaaatttaatatttattaataactgaaactgtttgtcttcctttggtatatagtctcgcatattatattatagcaggccaagataaaattttgacagctctttaagcccacatgcagcagtgggtcagataaccctgtggcagtgacacgggcaaattggcatttgaataaagccctgggaccacctcaacatgcgtagcctcttgtcttaaatgtactccccatggcagcatggaggaggcaagacctgtgggtcaattttgaactggccttactttgatttttaaaacaagagactcagggaaagtactaaaccaaaatctctgattttactttgcgttttctgtagtttttgttttactgagatgcttttgtaaaggaaaataatactgtgacagtttagtaattctacagattcttaatatttctccatcatggccttttacttcacaattttctgaagtctgaattcaattacaatttttttttaccaatttaatctcaaatgttgtttaactgctttaaattcatatacgtagagtattataaactgcagagatgaaaaatgtgttttcacgggatttatattgtgaactaaactaagcctactttttgtgacttatttgtgatgccttgttgataaatatgtgtaataagtatgtttaaaaaaaaaaaaa

SEQ ID NO: 271 - DNA, 1069 bp, Homo sapiens
  hypothetical protein HSPC111, nucleolar protein 16 homolog transcript variant 3 (NOP16), HBV pre-S2 trans-regulated protein 3, HSPC185
  CDS (224)...(760): NOP16
gtcatgaaaggggcggggaaacgaataaattgagccttgtacgcaggcgcaaatgctcgttgcatcctgggagtcgtagtgctcagcacggtagtgctacaaaaggactacatttccccaaatgcccgcaaagccttgtgcacgccttccggaaggagtttgttacacgaggtctgagagacagaggcagcgtgtttgagctgctggtgcggtggtcagcgcgatgcccaaggccaagggcaaaacccggaggcagaagtttggttacagtgtcaaccgaaagcgtctgaaccggaatgctcgacggaaggcagcgccgcggatcgaatgctcccacatccgacatgcctgggaccacgctaaatcggtacggcagaacctggccgagatggggttggctgtggaccccaacagggcggtgcccctccgtaagagaaaggtgaaggccatggaggtggacatagaggagaggcctaaagagcttgtacggaagccctatgtgctgaatgacctggaggcagaagccagccttccagaaaagaaaggaaatactctgtctcgggacctcattgactatgtacgctacatggtagagaaccacggggaggactataaggccatggcccgtgatgagaagaattactatcaagataccccaaaacagattcggagtaagatcaacgtctataaacgcttttacccagcagagtggcaagacttcctcgattctttgcagaagaggaagatggaggtggagtgactggtttacatcacagctgccccaggctgaggcgtcccccggaccagtgaagctggagccagggtgtaaggcaaggaggtgctgtgtggctccagaggagctggccaggtcccatggaatcagaaggttacacacacgtgcacactccccgctctggggaaggaactgttctcagaggctccaatttatattcatctgggggttcacggaaaagccagaacctgctgttttcagggtgggtgatgtaaatatagtgtgtacataataaagcaaatatattttacttctctgaaaaaaaaaaaaaaaaaa

SEQ ID NO: 272 - DNA, 2379 bp, Homo sapiens
  v-myc avian myelocytomatosis viral oncogene homolog (MYC), myc-related translation/localization regulatory factor (MRTL), class E basic helix-loop-helix protein 39 (bHLHe39), transcription factor p64, proto-oncogene c-Myc, p67 myc protein
  CDS (526)...(1890): MYC
gacccccgagctgtgctgctcgcggccgccaccgccgggccccggccgtccctggctcccctcctgcctcgagaagggcagggcttctcagaggcttggcgggaaaaagaacggagggagggatcgcgctgagtataaaagccggttttcggggctttatctaactcgctgtagtaattccagcgagaggcagagggagcgagcgggcggccggctagggtggaagagccgggcgagcagagctgcgctgcgggcgtcctgggaagggagatccggagcgaatagggggcttcgcctctggcccagccctcccgctgatcccccagccagcggtccgcaacccttgccgcatccacgaaactttgcccatagcagcgggcgggcactttgcactggaacttacaacacccgagcaaggacgcgactctcccgacgcggggaggctattctgcccatttggggacacttccccgccgctgccaggacccgcttctctgaaaggctctccttgcagctgcttagacgctggatttttttcgggtagtggaaaaccagcagcctcccgcgacgatgcccctcaacgttagcttcaccaacaggaactatgacctcgactacgactcggtgcagccgtatttctactgcgacgaggaggagaacttctaccagcagcagcagcagagcgagctgcagcccccggcgcccagcgaggatatctggaagaaattcgagctgctgcccaccccgcccctgtcccctagccgccgctccgggctctgctcgccctcctacgttgcggtcacacccttctcccttcggggagacaacgacggcggtggcgggagcttctccacggccgaccagctggagatggtgaccgagctgctgggaggagacatggtgaaccagagtttcatctgcgacccggacgacgagaccttcatcaaaaacatcatcatccaggactgtatgtggagcggcttctcggccgccgccaagctcgtctcagagaagctggcctcctaccaggctgcgcgcaaagacagcggcagcccgaaccccgcccgcggccacagcgtctgctccacctccagcttgtacctgcaggatctgagcgccgccgcctcagagtgcatcgacccctcggtggtcttcccctaccctctcaacgacagcagctcgcccaagtcctgcgcctcgcaagactccagcgccttctctccgtcctcggattctctgctctcctcgacggagtcctccccgcagggcagccccgagcccctggtgctccatgaggagacaccgcccaccaccagcagcgactctgaggaggaacaagaagatgaggaagaaatcgatgttgtttctgtggaaaagaggcaggctcctggcaaaaggtcagagtctggatcaccttctgctggaggccacagcaaacctcctcacagcccactggtcctcaagaggtgccacgtctccacacatcagcacaactacgcagcgcctccctccactcggaaggactatcctgctgccaagagggtcaagttggacagtgtcagagtcctgagacagatcagcaacaaccgaaaatgcaccagccccaggtcctcggacaccgaggagaatgtcaagaggcgaacacacaacgtcttggagcgccagaggaggaacgagctaaaacggagcttttttgccctgcgtgaccagatcccggagttggaaaacaatgaaaaggcccccaaggtagttatccttaaaaaagccacagcatacatcctgtccgtccaagcagaggagcaaaagctcatttctgaagaggacttgttgcggaaacgacgagaacagttgaaacacaaacttgaacagctacggaactcttgtgcgtaaggaaaagtaaggaaaacgattccttctaacagaaatgtcctgagcaatcacctatgaacttgtttcaaatgcatgatcaaatgcaacctcacaaccttggctgagtcttgagactgaaagatttagccataatgtaaactgcctcaaattggactttgggcataaaagaacttttttatgcttaccatcttttttttttctttaacagatttgtatttaagaattgtttttaaaaaattttaagatttacacaatgtttctctgtaaatattgccattaaatgtaaataactttaataaaacgtttatagcagttacacagaatttcaatcctagtatatagtacctagtattataggtactataaaccctaattttttttatttaagtacattttgctttttaaagttgatttttttctattgtttttagaaaaaataaaataactggcaaatatatcattgagccaaatcttaaaaaaaaaaaaaaa

SEQ ID NO: 273 - DNA, 2319 bp, Homo sapiens
  mitogen-activated protein kinase kinase 3 transcript variant B (MAP2K3, MKK3), stress-activated protein kinase kinase 2 (SAPKK-2, SAPKK2), MAPK/ERK kinase 3 (MEK3), dual specificity mitogen-activated protein kinase kinase 3, PRKMK3
  CDS (266)...(1309): MAP2K3
gcaggggcggggcctgagtcagcgcagttcggccggggtctccccggcgctgcccagtctgtctccggcgccgcccgtcgcggactcgtccttgctgcagtcgccgccgcagtcctcgccgcagtcgccgccgccgccgccgccgccgccgctgctcctccgcctggcctgggccgtctgcccgcagccatgagcgtgctcggccccggtggagcccgcagtcctctagattagtctccaccgccgtccaggacccacttgcagcatggagtcgcccgcctcgagccagcccgccagcatgccccagtccaaaggaaaatccaagaggaagaaggatctacggatatcctgcatgtccaagccacccgcacccaaccccacacccccccggaacctggactcccggaccttcatcaccattggagacagaaactttgaggtggaggctgatgacttggtgaccatctcagaactgggccgtggagcctatggggtggtagagaaggtgcggcacgcccagagcggcaccatcatggccgtgaagcggatccgggccaccgtgaactcacaggagcagaagcggctgctcatggacctggacatcaacatgcgcacggtcgactgtttctacactgtcaccttctacggggcactattcagagagggagacgtgtggatctgcatggagctcatggacacatccttggacaagttctaccggaaggtgctggataaaaacatgacaattccagaggacatccttggggagattgctgtgtctatcgtgcgggccctggagcatctgcacagcaagctgtcggtgatccacagagatgtgaagccctccaatgtccttatcaacaaggagggccatgtgaagatgtgtgactttggcatcagtggctacttggtggactctgtggccaagacgatggatgccggctgcaagccctacatggcccctgagaggatcaacccagagctgaaccagaagggctacaatgtcaagtccgacgtctggagcctgggcatcaccatgattgagatggccatcctgcggttcccttacgagtcctgggggaccccgttccagcagctgaagcaggtggtggaggagccgtccccccagctcccagccgaccgtttctcccccgagtttgtggacttcactgctcagtgcctgaggaagaaccccgcagagcgtatgagctacctggagctgatggagcaccccttcttcaccttgcacaaaaccaagaagacggacattgctgccttcgtgaaggagatcctgggagaagactcataggggctgggcctcggaccccactccggccctccagagccccacagccccatctgcgggggcagtgctcacccacaccataagctactgccatcctggcccagggcatctgggaggaaccgagggggctgctcccacctggctctgtggcgagccatttgtcccaagtgccaaagaagcagaccattggggctcccagccaggcccttgtcggccccaccagtgcctctccctgctgctcctaggacccgtctccagctgctgagatcctggactgagggggcctggatgccccctgtggatgctgctgcccctgcacagcaggctgccagtgcctgggtggatgggccaccgccttgcccagcctggatgccatccaagttgtatatttttttaatctctcgactgaatggactttgcacactttggcccagggtggccacacctctatcccggctttggtgcggggtacacaagaggggatgagttgtgtgaataccccaagactcccatgagggagatgccatgagccgcccaaggccttcccctggcactggcaaacagggcctctgcggagcacactggctcacccagtcctgcccgccaccgttatcggtgtcattcacctttcgtgttttttttaatttatcctctgttgattttttcttttgctttatgggtttggcttgtttttcttgcatggtttggagctgatcgcttctcccccaccccctagggtaccagcaggcagagccttgccctctgctcaggctggggtccagtgggaggggcccaagatctctgctcagagaagtgcagggggagccttccagctcactctccctgaggactggcttgacaggggctatgggtttgctttggtgttgtttttaaaaaaagaaaatatatttttttgaaaaaacgactgcccatcccgggtcctttccctgatgggttggggcagttacctggttgctgttttaattaaaaaaaaaaaaaaaaaaaggactaaa

SEQ ID NO: 274 - DNA, 2048 bp, Homo sapiens
  guanine nucleotide binding protein-like 3 (nucleolar) transcript variant 1 (GNL3), estradiol-induced nucleotide binding protein, E2-induced gene 3 protein (E2IG3), novel nucleolar protein 47 (NNP47), nucleostemin (NS), nucleolar GTP-binding protein 3
  CDS (174)...(1823): GNL3
gcggccgccaagcgatccctgctccgcgcgacactgcgtgcccgcgcacgcagagaggcggtgacgcactttacggcggcagcgtaagtgcgtgacgctcgtcagtggcttcagttcacacgtggcgccagcggaggcaggttgatgtgtttgtgcttccttctacagccaatatgaaaaggcctaagttaaagaaagcaagtaaacgcatgacctgccataagcggtataaaatccaaaaaaaggttcgagaacatcatcgaaaattaagaaaggaggctaaaaagcggggtcacaagaagcctaggaaagacccaggagttccaaacagtgctccctttaaggaggctcttcttagggaagctgagctaaggaaacagaggcttgaagaactaaaacagcagcagaaacttgacaggcagaaggaactagaaaagaaaagaaaacttgaaactaatcctgatattaagccatcaaatgtggaacctatggaaaaggagtttgggctttgcaaaactgagaacaaagccaagtcgggcaaacagaattcaaagaagctgtactgccaagaacttaaaaaggtgattgaagcctccgatgttgtcctagaggtgttggatgccagagatcctcttggttgcagatgtcctcaggtagaagaggccattgtccagagtggacagaaaaagctggtacttatattaaataaatcagatctggtaccaaaggagaatttggagagctggctaaattatttgaagaaagaattgccaacagtggtgttcagagcctcaacaaaaccaaaggataaagggaagataaccaagcgtgtgaaggcaaagaagaatgctgctccattcagaagtgaagtctgctttgggaaagagggcctttggaaacttcttggaggttttcaggaaacttgcagcaaagccattcgggttggagtaattggtttcccaaatgtggggaaaagcagcattatcaatagcttaaaacaagaacagatgtgtaatgttggtgtatccatggggcttacaaggagcatgcaagttgtccccttggacaaacagatcacaatcatagatagtccgagcttcatcgtatctccacttaattcctcctctgcgcttgctctgcgaagtccagcaagtattgaagtagtaaaaccgatggaggctgccagtgccatcctttcccaggctgatgctcgacaggtagtactgaaatatactgtcccaggctacaggaattctctggaattttttactgtgcttgctcagagaagaggtatgcaccaaaaaggtggaatcccaaatgttgaaggtgctgccaaactgctgtggtctgagtggacaggtgcctcattagcttactattgccatccccctacatcttggactcctcctccatattttaatgagagtattgtggtagacatgaaaagcggcttcaatctggaagaactggaaaagaacaatgcacagagcataagagccatcaagggccctcatttggccaatagcatccttttccagtcttccggtctgacaaatggaataatagaagaaaaggacatacatgaagaattgccaaaacggaaagaaaggaagcaggaggagagggaggatgacaaagacagtgaccaggaaactgttgatgaagaagttgatgaaaacagctcaggcatgtttgctgcagaagagacaggggaggcactgtctgaggagactacagcaggtgaacagtctacaaggtcttttatcttggataaaatcattgaagaggatgatgcttatgacttcagtacagattatgtgtaacagaacaatggctttttatgattttttttttaacattttaagcagactgctaaactgttctctgtataagttatggtatgcatgagctgtgtaaattttgtgaatatgtattatattaaaaccaggcaacttggaatccctaaattctgtaaaaagacaattcatctcattgtgagtggaagtagttatctggaataaaaaaagaagatacctattgaaaaaaaa

SEQ ID NO: 275 - DNA, 1724 bp, Homo sapiens
  RRS1 ribosome biogenesis regulator homolog (S. cerevisiae) (RRS1), homolog of yeast ribosome biogenesis regulatory protein RRS1
  CDS (105)...(1202): RRS1
gcatcccggcatctgcacgtggttatgctgccggagtttgggccgccactgtaggaaaagtaacttcagctgcagccccaaagcgagtgagccgagccggagccatggagggccagagcgtggaggagctgctcgcaaaggcagagcaggacgaggcagagaagttgcaacgcatcacggtgcacaaggagctggagctgcagtttgacctgggcaacctgctggcgtcggaccggaaccccccgaccgggctgcggtgcgccggacccacgccggaggccgagctacaggccctggcgcgggacaacacgcaactgctcatcaaccagctgtggcagctgcccacggagcgcgtggaagaggcgatagtggcgcggctgccggagcccaccacacgcctgccgcgagagaagcctctgccccgaccgcggccacttacacgctggcagcagttcgcgcgcctcaagggcatccgtcccaagaagaagaccaacctggtgtgggacgaggtgagtggccagtggcggcggcgctggggctaccagcgcgcccgggacgacaccaaagaatggctgattgaggtgcccggcaatgccgaccccttggaggaccagttcgccaagcggattcaggccaagaaggaaagggtggccaagaacgagctgaaccggctgcgtaacctggcccgcgcgcacaagatgcagctgcccagcgcggccggcttgcaccctaccggacaccagagtaaggaggagctgggccgcgccatgcaagtggccaaggtctccaccgcctctgtggggcgctttcaggagcgcctccccaaggagaaggtgccccggggctccggcaagaaaaggaagtttcaaccccttttcggggactttgcagccgagaaaaagaaccagttggagctgcttcgtgtcatgaacagcaagaagcctcagctggatgtgactagggccaccaataagcagatgagggaggaggaccaggaggaggccgccaagaggaggaaaatgagccagaagggcaagagaaagggaggccggcaggggcctgggggcaagaggaaagggggcccgcccagccagggagggaagaggaaagggggcttgggaggcaagatgaattctgggccgcctggcttgggtggcaagagaaaaggaggacagcgcccaggaggaaagaggaggaagtaatagtttctaactgtcggacccgtctgtaaaccaaggactatgaatactaaatgttaagttctaggcaattatacggggactcagaaggacctggccgctgccttcattgagtttaaagggacaggattgcccttccgtcaagaaagtatgtaagtgttggactgcacaaattaatgtttttcccacaaccgagactttggagattaagaacttatttgaggatttaagaattagggaaataatttggtggaaaccgggaatgagttctattcttaaacagcctttttttttctttttaatgttggatatacggcgaggtagagttggccatatttcagagacttagattgacgtatatgtttctgcattatttttacaacaagtttgtgtatcagagcgggagtgcgggggagggaaagaaaacaaacagtttcagaattgaataggcaagtgactgttttaaagattaagtaataaagatgtcttatctagtgtgacttttaaaaaaaaaaaaaaaaaaaa

SEQ ID NO: 276 - DNA, 1668 bp, Homo sapiens
  FOS-like antigen 1 (FOSL1), fos-related antigen 1 (FRA, fra-1, FRA1)
  CDS (188)...(1003): FOSL1
acgggccaaggcggcgcgtctcgggggtggagcctggaggtgaccgcgccgctgcaacgcccccaccccccgcggtcgcagtggttcagcccgagaacttttcattcataaaaagaaaagactccgcacggcgcgggtgagtcagaacccagcagccgtgtaccccgcagagccgccagccccgggcatgttccgagacttcggggaacccggcccgagctccgggaacggcggcgggtacggcggccccgcgcagcccccggccgcagcgcaggcagcccagcagaagttccacctggtgccaagcatcaacaccatgagtggcagtcaggagctgcagtggatggtacagcctcatttcctggggcccagcagttaccccaggcctctgacctaccctcagtacagccccccacaaccccggccaggagtcatccgggccctggggccgcctccaggggtacgtcgaaggccttgtgaacagatcagcccggaggaagaggagcgccgccgagtaaggcgcgagcggaacaagctggctgcggccaagtgcaggaaccggaggaaggaactgaccgacttcctgcaggcggagactgacaaactggaagatgagaaatctgggctgcagcgagagattgaggagctgcagaagcagaaggagcgcctagagctggtgctggaagcccaccgacccatctgcaaaatcccggaaggagccaaggagggggacacaggcagtaccagtggcaccagcagcccaccagccccctgccgccctgtaccttgtatctccctttccccagggcctgtgcttgaacctgaggcactgcacacccccacactcatgaccacaccctccctaactcctttcacccccagcctggtcttcacctaccccagcactcctgagccttgtgcctcagctcatcgcaagagtagcagcagcagcggagacccatcctctgacccccttggctctccaaccctcctcgctttgtgaggcgcctgagccctactccctgcagatgccaccctagccaatgtctcctccccttcccccaccggtccagctggcctggacagtatcccacatccaactccagcaacttcttctccatccctctaatgagactgaccatattgtgcttcacagtagagccagcttggggccaccaaagctgcccactgtttctcttgagctggcctctctagcacaatttgcactaaatcagagacaaaatatttcccatttgtgccagaggaatcctggcagcccagagactttgtagatccttagaggtcctctggagccctaaccccttccagatcactgccacactctccatcaccctcttcctgtgatccacccaaccctatctcctgacagaaggtgccactttacccacctagaacactaactcaccagccccactgccagcagcagcaggtgattggaccaggccattctgccgccccctcctgaaccgcacagctcaggaggcgcccttggcttctgtgatgagctgatctgcggatctcagctttgagaagccttcagctccagggaatccaagcctccacagcgagggcagctgctatttattttcctaaagagagtatttttatacaaacctaccaaaatggaataaaaggcttgaagctgtg

SEQ ID NO: 277 - DNA, 4890 bp, Homo sapiens
  TSR1, 20S rRNA accumulation, homolog (S. cerevisiae) (TSR1), pre-rRNA-processing protein TSR1 homolog
  CDS (958)...(3372): TSR1
cgccacgggggtcgctgtcatggcaacgcacccgctcccgcatggagggcgcgaagccgcattgtgagcgctggccctggagcccgcggccccgcggctgagagcgagcctcggtcccgctgaagctcccctgacttctgcctgctccctctcccgacgggacggaaagggccggggctcgggcatggggtcccctgcggtccgagcctgcccacggcgaagccggtgcagcctggccccgtgacccctctgaatccccgtccggccgtcgccgtgcagttgtcaagtttctgggaagattagtgggagcgcagccgcccgagcccgacggccggagggtcgcggccagtcccccttgccgggtcgccacgtcccacaaggtccttcccggccgctccgtgggaggcggggcgcaggttggagtaacagggacgggcttgagctggtacggaaccgggcaaggtgagagaagtgtcttccacgcgattcccaagcctcgctagggaatcgagggagaagaaaggttgctcagagtgataaagaacatgccgttgcaaacggaagagcaacgtgcccgaatctaggtgacaggaagggcttaggccttttcggcacgaatggagccttccagtcaacatgcttctacgtgatgcagctttatagcgcaaaaaaatgacaatgcaaggggtacaaacagccctgctagaccaacagcccgagcctcgacagtctacatccggcgccttcaagcccccaaccacacactgcgaagtgggaaaagttcccagcgcggcttggcgaacccgctaacacggcgctctcacgagctgctggaaaagaccttcgcgagagggcgcagggagtcccgctccctggagggcccgcccccttggaggggaccggaagcgcttgtcctggcccggaagcagtgctgactccgtacacgcgcgctgcggcatggcggcccaccgccccggcccgctcaagcagcagaataaagctcataaaggcggacggcatcggggtcggggatctgcacagcgggacggcaagggccgtctggcactgaaaaccctaagcaagaaggtgagaaaagaactcagcagagtcgaccagaggcatcgcgccagccagctccgaaagcagaagaaggaggcggttctggcagagaagagacagctgggtggcaaggatggccctcctcatcaggtactggtggtgcccctgcacagcagaatttccctgccagaggccatgcagctgcttcaagatagggacactggaacagtacacttgaatgaattgggaaacacccagaactttatgctgctgtgcccccgcttgaaacatcggtggtttttcacctcagcaaggccaggggatctgcacgttgtgttagacatggctaaagtagctgataccatcctgttcctccttgatccactagaaggctgggacagcaccggtgattactgtctttcctgcctctttgctcagggccttccgacctatacactagctgtccaggggatttctggcctcccactgaagaaacaaatagataccaggaagaagctaagtaaagcagtggagaagcgctttccgcatgacaaactcctcttgttagacactcaacaggaggcagggatgctgcttaggcagttggctaaccagaagcaacagcatcttgcttttcgagatcggcgggcctacctatttgcccatgctgttgattttgttcctagtgaagagaataacttggtgggcaccttgaaaatttcaggctatgttcgagggcagactctgaatgtcaataggttgctgcatatcgttggatatggtgatttccagatgaaacagatagatgcccccggagaccctttccctttaaatcctagaggaattaaaccccaaaaggacccagacatggcaatggagatttgtgctacggatgctgtagatgatatggaagaaggtcttaaagtcctaatgaaggcagaccctggtagacaggaatccttgcaagcagaggttatcccagatccaatggagggagagcaaacctggcccactgaggaggagctgagcgaggcaaaggatttcttgaaggaaagttctaaggtggtaaagaaggtccccaaaggaacatccagttaccaagctgaatggattttggatggtggcagccaaagtggtggggaaggagatgaatatgaatatgatgatatggaacatgaggattttatggaggaggaatctcaggatgagagtagtgaagaagaggaagaatatgaaactatgactattggggagtctgtgcatgatgatctgtatgataagaaagtagatgaagaagctgaggcaaaaatgttggagaaatataaacaagaaagactggaagagatgtttccagatgaagtggacacgccccgtgatgtggctgctcgaattcgatttcagaaatacagaggccttaagagcttccggacatctccatgggatcctaaggaaaaccttcctcaagattatgctcgaatatttcagtttcagaactttactaacactaggaaaagcatctttaaagaggttgaagaaaaagaggttgaaggagctgaggttggctggtatgtcacacttcatgtctctgaagtccccgtctcagtggtcgagtgcttcaggcaaggaacacccttgattgcattttctttactacctcatgaacagaagatgtcagtattgaatatggtggtgaggcgtgaccctggcaacactgaacctgtgaaagccaaggaagagctcatatttcactgtggattcaggcgcttccgagcctcacctttattctctcagcacactgcagcggacaaacataaattgcagagattcctgactgctgacatggccctggtggcgacagtctatgcgccaatcacttttcctcctgcatctgtgctgcttttcaagcaaaaaagcaatggaatgcacagcctcattgctacaggccatcttatgtcagtagatccagacagaatggtcatcaagagagttgttctgagtggtcatcctttcaaaatttttactaagatggcagtagtacgttacatgttcttcaacagagaggatgtgctgtggtttaaaccagtggaactgagaacgaagtggggccggagaggacatatcaaggaacctttaggtacccatggccacatgaaatgcagctttgatgggaagctaaaatctcaagacacagtactgatgaacctgtataaacgagtcttccccaaatggacttatgatccatatgtaccagaaccagtaccctggctgaaaagtgagatttcttcaacagtgcctcaagggggcatggagtaatggattcaaagagattctgtcttaccggtgccagtcagtactccagggatgggaggcacaagttgtgattgggcaaagtttattttctatgtcagcctgtcagtccactgccccattttgcaagacttttttttagccttgacaaaatgtctcagttaagtataaaagtttttccactacttagtccaaaaaaaactattaaatcttaatgaaatagccactctccattaagaatctgataactaagagttgacaatactaggaaacaaaatgtcttcagtatctaaagacactgaattcccaccatttccttttctgtaaattaaacagaaacagactgataagaagctggcctttcagcctgcttcacccaagttatggaggaggttaagtctacatttccaccactgagcacaatacaaatgttctttacttctggggaaacagtttgaaaatgttgagacagcacagcagccactccaacaccagctgtaggttcaatgagtagtttcatcctctcccacaccagctgggttgcacactgttgatatggaagggagtaggaattagtgaaaggggagtctagttggtttacctataaagttcagatgagaatacgtgtccagtttgaattttcttatcactgtgtacacacgcttcccaaagcttttctttaattctgactctgcttctgtcaagagggttgtcattaatacatctagggtaccctcccatgtcatgaagttacctagtcaggttcccgtgggtcacttgctactcctaagggaagtttcttctgcctaagaagttacaccatgctttgctatttcttttcttgctggagcctcaccttaatttcatcctctgtgacagtgaagatatcatccacaaggtccctgataataggccaggtgttcaagccaatgctggatttgacaccatctgctatggtttctggaggataaagattgggcatcagtttccccttcagcttggactggtagcagtcatctgcatttgagggttcagcagcatataccttcacactaggtttcagagcctgggaagaggaatattaagacatcttaacaacaaaccacaacattgcctgcatgtctaaaagaaaatatgggcctggtgtggtggctcacacctgtaatcccaacactttgggagcccgaggcgggtggatcagctgaggtcaggagttcaagaccagcctggccaacctggtgaaatgcagtgtcaactaaaaataggaaaatcagccaggcgtggtggcagacccctgtaatcccagctactcaagaggctgaggtaggagaatcacttgaacttgggaggggtaggttgcagtgagctgagatcacaccaaaatggggtggggcgcagtggctcacgcctgtaatcccagcactttgggaggccgaggtgggcggatcacgaggtagggagatcaagaccatcctggctaacacggtgaaaccccgtctctactaaaaatacaaaaaaaaaaaa

SEQ ID NO: 278 - DNA, 4457 bp, Homo sapiens
  sprouty-related, EVH1 domain containing 2 transcript variant 1 (SPRED2, Spred-2), sprouty protein with EVH-1 domain 2, related sequence, sprouty-related, EVH1 domain-containing protein 2
  CDS (536)...(1792): SPRED2
atccaatatggagtaaatcggtggagtcgagagatggggctcggacggggcgccctgcaccgcctcccaggcgcacctcccccggccgccgaccgctccccggaaccgtgattggcccggccccccgggggcgaccccggactgagcccccccacccgcggccggcgctctcctcctcctcgcagcagtccctgccgctccgaggcgcgcttgtttttctcctgctctcccccaccgccgtccccttcccaaatctcgccccctctgcccgctcccgagcccccggagcctccgcccgcctctccccacggcgctgcggcgttcactccccgcgcagcctgcctttgcaccccttcccccaaaccctatcccgcgccctgcttccccttctgctgcggcgccctcttcatctctagccgccccccctccccaaatcaggcgatctccggagatgtgaagaaggggggcgagcggacaggaagatgaagggagcaaagctgcccgccgcgggacaggcgtctaggtgaacaagaaaatgaccgaagaaacacacccagacgatgacagctatattgtgcgtgtcaaggctgtggttatgaccagagatgactccagcgggggatggttcccacaggaaggaggcgggatcagtcgcgtcggggtctgtaaggtcatgcaccccgaaggcaatggacgaagcggctttctcatccatggtgaacgacagaaagacaaactggtggtattggaatgctatgtaagaaaggacttggtctacaccaaagccaatccaacgtttcatcactggaaggtcgataataggaagtttggacttactttccaaagccctgctgatgcccgagcctttgacaggggagtaaggaaagcaatcgaagaccttatagaaggttcaacaacgtcatcttccaccatccataatgaagctgagcttggcgatgatgacgtttttacaacagctacagacagttcttctaattcctctcagaagagagagcaacctactcggacaatctcctctcccacatcctgtgagcaccggaggatttataccctgggccacctccacgactcataccccacagaccactatcacctcgatcagccgatgccaaggccctaccgccaggtgagcttcccggacgacgacgaggagatcgtgcgcatcaacccccgggagaagatctggatgacggggtacgaggattaccggcacgcacccgtcaggggcaagtacccggacccctcggaggacgcggactcctcctacgtgcgcttcgccaagggcgaggtccccaagcatgactacaactacccctacgtggactcctcagactttggcctaggcgaggaccccaaaggccgcgggggcagcgtgatcaagacgcagccctcccggggcaagtcgcggcggcggaaggaggacggagagcgctcgcggtgcgtgtactgcagggacatgttcaaccacgaggagaaccgccggggccactgccaggacgcgcccgactccgtgagaacttgcatccgccgggtgagctgcatgtggtgcgcggacagcatgctctatcactgtatgtcggaccccgagggagactatacagacccttgctcgtgcgatactagcgacgagaagttttgcctccggtggatggctcttattgccttgtctttcctggccccctgtatgtgctgttacctgccccttcgggcctgctaccactgcggagtgatgtgcaggtgctgtggcgggaagcacaaagcggccgcgtgactcagtttccctcccttctccctccatccgcagccacaggggaactcgtctcttacatactctcatcttctcccccgctcccttccactccaaggagcgaggagggcaagcggcctcccagctccctggtacctcgaggcaccattccagccagggacgctgccgggtagactctccactccccctgccgcccacactgcagcagccacatccatacacacacgctcgcacagtgttctgaggaaggaaccttcgccacagactcctgtactattaacaatctgtaaccaagctaactgtctcatccatgtgttgatttcctgtttcctcctcccccgcctcttccagttcaaaggagtctgcaattggaactgctgattttcggtgggttttgtagttgatttttccaagagcgtcgaagactctctttctcttggttcaccttgcctgtcgctagcaagcatctggttcagcggaaatgggatgtgagaatgatgaaacccgacagaagtatctcagcctgcagtcagttattatgtataggaggtgagctagttaacaaacttgtaccacaaaacaatatcgctttaacttttctaaagccaaatttcccatgtaagctgcagtttctatctttagcccatcatcattttctgcccccccaaaatctgttgaaatgattcactgatgcaaaacattcacccgtaatagactgagaattgagccttaacttcagattaacttgtgagaatcaggaaaattccttcaactgcattgcatcctcttggaccagggctagaatggggatttcaggtttctatgagcctccccattacccctaaagtagaacattttttaaattgtgttgccaccacttctaaaaatttagcaatattagaataggatactagtgaagtaagaaattttgcttgttgttttgcaaaccaaatagtttcctcaaacacaaatcagtgttcccacgaacaagttccagttgagaaacactaaggttatggtgaataaaaccatagggagcttcttccccccaacccctggctattttatattaatggggagaggggatttttaaatgtcataaatttgaagagtggtgggttgcattttcttcatgggtttatgttttcgtttcattttggactcaatttcacatcaccaaattcctcatttatacttggggaaaaaacaaggccatatgtaaaaacccttccaatgcctaagtgtctttctcctgcaactccaaacccagactcgccactttgggtgcacaggtggttaggtcagccaactggttctgcctgtcgccttgccacggaggaggcttctaattagctggaaaagagtatttttctaatacgttgcaaggattagccaaatcttcttattgaagaaagaagaaaagtgaagagtggttacctatacctagcatagtacaatcagaacctcgtggagaccaccggggacaggcttgcggacgccggctgttcttcccgccacgatctttctgtggtagcggccagcagaagacatggcctgctccccactccctttccccactccttctttattgcacacaggacaccagtcttcaaggaaagggacttttttccagtctgccaatcatattgggaaagtgctagctgtgctcaccttcatggggctgtttccagctcgtccacaagctcatcgattttctttagtagattaccggtgtaaatacccagtgtgcttatgagtcagttagtagacgtcttcattcattggagtaactggtttaggctttccagtttggaaaaggagcagagagctgtccatctggattgatggaagaaaagagaacctcatccatgcctggagaacatctagaaaaccttcagccagcctccagtgctgtcgagagaccaccttcccccgacccggaggcacttccttggggtctttctctagggtctcttctctacaaagcacaacactaatgttcgtttccttagacctcagttcaagtgcccctatttatttcaataagaacgcacatatcccagctgttttttgtttgtcacctctatttagttgttacctgtttctctcttctttcaccccttgtccttttccacccttttaagagttacgctagcagatcttactccacgtatactttttggtttgtgaaggcatcggttaagggcacaaagacagccatggggacatttatgtaaatacgtctctaattgccacactgcagctgaacagtgtgtagtattttcccagtcagctttgccatactgacgtcaatcatttgagagaaattattcagattttatttttgtatctgtggtaacaaaacattaaccaaaagattttctgtccagaagcctccccgaccccccaagctatttgctcacattaacaaattaaagtgcctgaagcataattcattctttacctgtatactaaaaaccctgttgtattgatttttttataataagcctttttacctctgtgtaaaaaatatatatacaagtgtatgatgtacattttagttcttaacttttttttatggtttctaatatgtatgaccaatgtagccattgctttaaaatgtaccgtgtaaatataaacacatcctatcagaaaaaaaaaaaaaaaa

SEQ ID NO: 279 - DNA, 4150 bp, Homo sapiens
  high mobility group AT-hook 2 transcript variant 1 (HMGA2), high-mobility group protein HMGI-C, high-mobility group (nonhistone chromosomal) protein isoform I-C (HMGI-C, HMGIC), BABL, LIPO, STQTL9
  CDS (812)...(1141): HMGA2
cttgaatcttggggcaggaactcagaaaacttccagcccgggcagcgcgcgcttggtgcaagactcaggagctagcagcccgtccccctccgactctccggtgccgccgctgcctgctcccgccaccctaggaggcgcggtgccacccactactctgtcctctgcctgtgctccgtgcccgaccctatcccggcggagtctccccatcctcctttgctttccgactgcccaaggcactttcaatctcaatctcttctctctctctctctctctctctctctctctctctctctctctctctctctctctcgcagggtggggggaagaggaggaggaattctttccccgcctaacatttcaagggacacaattcactccaagtctcttccctttccaagccgcttccgaagtgctcccggtgcccgcaactcctgatcccaacccgcgagaggagcctctgcgacctcaaagcctctcttccttctccctcgcttccctcctcctcttgctacctccacctccaccgccacctccacctccggcacccacccaccgccgccgccgccaccggcagcgcctcctcctctcctcctcctcctcccctcttctctttttggcagccgctggacgtccggtgttgatggtggcagcggcggcagcctaagcaacagcagccctcgcagcccgccagctcgcgctcgccccgccggcgtccccagccctatcacctcatctcccgaaaggtgctgggcagctccggggcggtcgaggcgaagcggctgcagcggcggtagcggcggcgggaggcaggatgagcgcacgcggtgagggcgcggggcagccgtccacttcagcccagggacaacctgccgccccagcgcctcagaagagaggacgcggccgccccaggaagcagcagcaagaaccaaccggtgagccctctcctaagagacccaggggaagacccaaaggcagcaaaaacaagagtccctctaaagcagctcaaaagaaagcagaagccactggagaaaaacggccaagaggcagacctaggaaatggccacaacaagttgttcagaagaagcctgctcaggaggaaactgaagagacatcctcacaagagtctgccgaagaggactagggggcgccaacgttcgatttctacctcagcagcagttggatcttttgaagggagaagacactgcagtgaccacttattctgtattgccatggtctttccactttcatctggggtggggtggggtggggtgggggaggggggggtggggtggggagaaatcacataaccttaaaaaggactatattaatcaccttctttgtaatcccttcacagtcccaggtttagtgaaaaactgctgtaaacacaggggacacagcttaacaatgcaacttttaattactgttttcttttttcttaacctactaatagtttgttgatctgataagcaagagtgggcgggtgagaaaaaccgaattgggtttagtcaatcactgcactgcatgcaaacaagaaacgtgtcacacttgtgacgtcgggcattcatataggaagaacgcggtgtgtaacactgtgtacacctcaaataccaccccaacccactccctgtagtgaatcctctgtttagaacaccaaagataaggactagatactactttctctttttcgtataatcttgtagacacttacttgatgatttttaactttttatttctaaatgagacgaaatgctgatgtatcctttcattcagctaacaaactagaaaaggttatgttcatttttcaaaaagggaagtaagcaaacaaatattgccaactcttctatttatggatatcacacatatcagcaggagtaataaatttactcacagcacttgttttcaggacaacacttcattttcaggaaatctacttcctacagagccaaaatgccatttagcaataaataacacttgtcagcctcagagcatttaaggaaactagacaagtaaaattatcctctttgtaatttaatgaaaaggtacaacagaataatgcatgatgaactcacctaattatgaggtgggaggagcgaaatctaaatttcttttgctatagttatacatcaatttaaaaagcaaaaaaaaaaaaggggggggcaatctctctctgtgtctttctctctctctcttcctctccctctctcttttcattgtgtatcagtttccatgaaagacctgaataccacttacctcaaattaagcatatgtgttacttcaagtaatacgttttgacataagatggttgaccaaggtgcttttcttcggcttgagttcaccatctcttcattcaaactgcacttttagccagagatgcaatatatccccactactcaatactacctctgaatgttacaacgaatttacagtctagtacttattacatgctgctatacacaagcaatgcaagaaaaaaacttactgggtaggtgattctaatcatctgcagttctttttgtacacttaattacagttaaagaagcaatctccttactgtgtttcagcatgactatgtatttttctatgtttttttaattaaaaatttttaaaatacttgtttcagcttctctgctagatttctacattaacttgaaaattttttaaccaagtcgctcctaggttcttaaggataattttcctcaatcacactacacatcacacaagatttgactgtaatatttaaatattaccctccaagtctgtacctcaaatgaattctttaaggagatggactaattgacttgcaaagacctacctccagacttcaaaaggaatgaacttgttacttgcagcattcatttgttttttcaatgtttgaaatagttcaaactgcagctaaccctagtcaaaactatttttgtaaaagacatttgatagaaaggaacacgtttttacatacttttgcaaaataagtaaataataaataaaataaaagccaaccttcaaagaaacttgaagctttgtaggtgagatgcaacaagccctgcttttgcataatgcaatcaaaaatatgtgtttttaagattagttgaatataagaaaatgcttgacaaatattttcatgtattttacacaaatgtgatttttgtaatatgtctcaaccagatttattttaaacgcttcttatgtagagtttttatgcctttctctcctagtgagtgtgctgactttttaacatggtattatcaactgggccaggaggtagtttctcatgacggcttttgtcagtatggcttttagtactgaagccaaatgaaactcaaaaccatctctcttccagctgcttcagggaggtagtttcaaaggccacatacctctctgagactggcagatcgctcactgttgtgaatcaccaaaggagctatggagagaattaaaactcaacattactgttaactgtgcgttaaataagcaaataaacagtggctcataaaaataaaagtcgcattccatatctttggatgggccttttagaaacctcattggccagctcataaaatggaagcaattgctcatgttggccaaacatggtgcaccgagtgatttccatctctggtaaagttacacttttatttcctgtatgttgtacaatcaaaacacactactacctcttaagtcccagtatacctcatttttcatactgaaaaaaaaagcttgtggccaatggaacagtaagaacatcataaaatttttatatatatagtttatttttgtgggagataaattttataggactgttctttgctgttgttggtcgcagctacataagactggacatttaacttttctaccatttctgcaagttaggtatgtttgcaggagaaaagtatcaagacgtttaactgcagttgactttctccctgttcctttgagtgtcttctaactttattctttgttctttatgtagaattgctgtctatgattgtactttgaatcgcttgcttgttgaaaatatttctctagtgtattatcactgtctgttctgcacaataaacataacagcctctgtgatccccatgtgttttgattcctgctctttgttacagttccattaaatgagtaataaagtttggtcaaaacagaaaaaaaaaaa

SEQ ID NO: 280 - DNA, 2369 bp, Homo sapiens
  polo-like kinase 3 (PLK3), proliferation-related kinase (PRK), cytokine-inducible kinase (CNK), FGF-inducible kinase, cytokine-inducible serine/threonine-protein kinase
  CDS (101)...(2041): PLK3
cctgggcgccagcgcagcgtagcaaatccaggcagcgccacgcgcggccggggccgggcggaaccgagaagccgggaccgcgctgcgacgcgccggccgcatggagcctgccgccggtttcctgtctccgcgccccttccagcgtgcggccgccgcgcccgctcccccggccgggcccgggccgcctccgagtgccttgcgcggacctgagctggagatgctggccgggctaccgacgtcagaccccgggcgcctcatcacggacccgcgcagcggccgcacctacctcaaaggccgcttgttgggcaaggggggcttcgcccgctgctacgaggccactgacacagagactggcagcgcctacgctgtcaaagtcatcccgcagagccgcgtcgccaagccgcatcagcgcgagaagatcctaaatgagattgagctgcaccgagacctgcagcaccgccacatcgtgcgtttttcgcaccactttgaggacgctgacaacatctacattttcttggagctctgcagccgaaagtccctggcccacatctggaaggcccggcacaccctgttggagccagaagtgcgctactacctgcggcagatcctttctggcctcaagtacttgcaccagcgcggcatcttgcaccgggacctcaagttgggaaattttttcatcactgagaacatggaactgaaggtgggggattttgggctggcagcccggttggagcctccggagcagaggaagaagaccatctgtggcacccccaactatgtggctccagaagtgctgctgagacagggccacggccctgaggcggatgtatggtcactgggctgtgtcatgtacacgctgctctgcgggagccctccctttgagacggctgacctgaaggagacgtaccgctgcatcaagcaggttcactacacgctgcctgccagcctctcactgcctgcccggcagctcctggccgccatccttcgggcctcaccccgagaccgcccctctattgaccagatcctgcgccatgacttctttaccaagggctacacccccgatcgactccctatcagcagctgcgtgacagtcccagacctgacaccccccaacccagctaggagtctgtttgccaaagttaccaagagcctctttggcagaaagaagaagagtaagaatcatgcccaggagagggatgaggtctccggtttggtgagcggcctcatgcgcacatccgttggccatcaggatgccaggccagaggctccagcagcttctggcccagcccctgtcagcctggtagagacagcacctgaagacagctcaccccgtgggacactggcaagcagtggagatggatttgaagaaggtctgactgtggccacagtagtggagtcagccctttgtgctctgagaaattgtatagccttcatgcccccagcggaacagaacccggcccccctggcccagccagagcctctggtgtgggtcagcaagtgggttgactactccaataagttcggctttgggtatcaactgtccagccgccgtgtggctgtgctcttcaacgatggcacacatatggccctgtcggccaacagaaagactgtgcactacaatcccaccagcacaaagcacttctccttctccgtgggtgctgtgccccgggccctgcagcctcagctgggtatcctgcggtacttcgcctcctacatggagcagcacctcatgaagggtggagatctgcccagtgtggaagaggtagaggtacctgctccgcccttgctgctgcagtgggtcaagacggatcaggctctcctcatgctgtttagtgatggcactgtccaggtgaacttctacggggaccacaccaagctgattctcagtggctgggagcccctccttgtgacttttgtggcccgaaatcgtagtgcttgtacttacctcgcttcccaccttcggcagctgggctgctctccagacctgcggcagcgactccgctatgctctgcgcctgctccgggaccgcagcccagcctaggacccaagccctgaggcctgaggcctgtgcctgtcaggctctggcccttgcctttgtggccttcccccttcctttggtgcctcactgggggctttgggccgaatcccccagggaatcagggaccagctttactggagttgggggcggcttgtcttcgctggctcctaccccatctccaagataagcctgagccttagctcccagctagggggcgttatttatggaccacttttatttattgtcagacacttatttattgggatgtgagccccaggggggcctcctcctaggataataaacaattttgcagaattggaaaaaaaaaaaa

SEQ ID NO: 281 - DNA, 1871 bp, Homo sapiens
  yrdC domain-containing protein, mitochondrial (YRDC), yrdC N(6)-threonylcarbamoyltransferase domain containing, dopamine receptor interacting protein 3 (DRIP3), ischemia/reperfusion inducible protein (IRIP), RP11-109P14.4, SUA5
  CDS (14)...(853): YRDC
cgggcctgggcggatgtctccggcgcgtcggtgcagggggatgagggccgcggtggctgccagcgtggggttgagcgaggggcctgctggctcccggagcggtcgcctcttccgcccgccgagtcccgctccggcggcccccggcgcccggctgttgcggctcccggggagcggggccgtgcaggccgcgagcccggagcgcgccggctggaccgaggcgctgcgggccgccgtggccgagctgcgcgccggcgccgtggtggccgtccccaccgatacgctgtacggcctggcctgcgcggcgagctgctcggcggctctgcgcgctgtgtaccgcctcaagggtcgcagcgaggccaagcctctggccgtatgcctcggccgcgtggccgacgtctacagatactgccgtgtgagagtacctgaggggctcctgaaagacctactgccaggaccagtgaccctggtgatggaacgctcggaggagctcaacaaggacctaaacccttttacgcctcttgtaggcattcggattcctgatcatgcttttatgcaagacttggctcagatgtttgagggtccgcttgctctcactagtgccaacctcagctcccaggccagttctctgaatgtcgaggagttccaggatctctggcctcagttgtccttggttattgatgggggacaaattggggatggccagagccccgagtgtcgccttggctcaactgtggttgatttgtctgtgcccggaaagtttggcatcattcgtccaggctgtgccctggaaagtactacagccatcctccaacagaagtacggactgctcccctcacatgcgtcctacctgtgaaactctgggaagcaggaaggcccaagacctggtgctggatactatgtgtctgtccactgacgactgtcaaggcctcatttgcagaggccaccggagctagggcactagcctgacttttaaggcagtgtgtctttctgagcactgtagaccaagcccttggagctgctggtttagccttgcacctggggaaaggatgtatttatttgtattttcatatatcagccaaaagctgaatggaaaagttaagaacattcctaggtggccttattctaataagtttcttctgtctgttttgtttttcaattgaaaagtaattaaataacagatttagaatctagtgagagcctcctctctggtgggtggtggcatttaaggttcaaaccagccagaagtgctggtgctgtttaaaaagtctcaggtggctgcgtgtggtggctcatgcctgtaatcccaacattctgggaggcccaggcgggagaactgcttgagcccaggagttcagaatcagcctgggcaacatagcaatactccgtctcataaaaattaataaataaaaagtctcaggtgaccaaaggctcctgaagctagaaccaggtttggataaagattgaagagccacaggccactcttccctctgagccattgggcctagtggtgtcatgtattgtaattgctcgcagggagagcagtctttttggtgtaatagtgggatgtctgcttagttggcaggggttcagtccaaatggaagaatattgggaaataaacctccactatcctttatagccagggacttttttcttatttattcataaaataaattatagttaattatacccataacacctttatttaaatccagtgttctccgcagccttttgtctatttatatgtgtaccaagtgttaaacataattattattgggcatttgaactttgtttttctttaaagaaatgctgctattaaacatatttgtaaatggtttaaaaaaaaaaaaaaaaaaaaaaaaaaaaaaaaaaa

SEQ ID NO: 282 - DNA, 1353 bp, Homo sapiens
  polymerase (RNA) I polypeptide C, 30kDa (POLR1C), RNA polymerases I and III subunit AC1 (RPAC1), DNA-directed RNA polymerases I and III 40 kDa polypeptide (RPA40), DNA-directed RNA polymerase I subunit C, AC40, RP3-337H4.4, RPA39, TCS3
  CDS (72)...(1112): POLR1C
cacggagacggagcagggctactaggacgcacgcgcgagatagaacctctagtctcgtggagagattgaagatggcggcttctcaggcggtggaggaaatgcggagccgcgtggttctgggggagtttggggttcgcaatgtccatactactgactttcccggtaactattccggttatgatgatgcctgggaccaggaccgcttcgagaagaatttccgtgtggatgtagtacacatggatgaaaactcactggagtttgacatggtgggaattgacgcagccattgccaatgcttttcgacgaattctgctagctgaggtgccaactatggctgtggagaaggtcctggtgtacaataatacatccattgttcaggatgagattcttgctcaccgtctggggctcattcccattcatgctgatccccgtctttttgagtatcggaaccaaggagatgaagaaggcacagagatagatactctacagtttcgtctccaggtcagatgcactcggaacccccatgctgctaaagattcctctgaccccaacgaactgtacgtgaaccacaaagtgtataccaggcatatgacatggatccccctggggaaccaggctgatctctttccagagggcactatccgaccagtgcatgatgatatcctcatcgctcagctgcggcctggccaagaaattgacctgctcatgcactgtgtcaagggcattggcaaagatcatgccaagttttcaccagtggcaacagccagttacaggctcctgccagacatcaccctgcttgagcccgtggaaggggaggcagctgaggagttgagcaggtgcttctcacctggtgttattgaggtgcaggaagtccaaggtaaaaaggtggccagagttgccaacccccggctggataccttcagcagagaaatcttccggaatgagaagctaaagaaggttgtgaggcttgcccgggttcgagatcattatatcttctctgttgagtcaacgggggtgttgccaccagatgtgctggtgagtgaagccatcaaagtactgatggggaagtgccggcgcttcttggatgaactagatgcggttcagatggactgagcttggatgcttctgaggcaagctgaagctttgggttctgactgacccaccctacaggactgctgaacagagagcccagtgtgactagggatcctgagttttctgggacaattccagctttaatcaatacattttgttaaatgtgccataaaatgagactttttacgcctttataaggccttagatgtaaataaactcacccaaacaaaaaaaaaaaaaaaaaaaaaaaaaaaaaaaaaaa

SEQ ID NO: 283 - DNA, 1745 bp, Homo sapiens
  peter pan homolog (Drosophila) (PPAN), second-step splicing factor 1, suppressor of sterile four 1 (SSF, SSF-1, SSF1, SSF2), brix domain-containing protein 3 (BXDC3), suppressor of SWI4 1 homolog
  CDS (173)...(1594): PPAN
gtgtctccatagcaaccgctccatctgattgcccctccccgctcccagaggccacctagtgcgcaggcccgcctgatgtcgtcccacgccgtgccggctctcaggcgccggaagtgagctgcgcagcgccggaagcggcggacgcaggaggcctcgtggaggacacagcagcatgggacagtcagggaggtcccggcaccagaagcgcgcccgcgcccaggcgcagctccgcaacctcgaggcctatgccgcgaacccgcactcgttcgtgttcacgcgaggctgcacgggtcgcaacatccggcagctcagcctggacgtgcggcgggtcatggagccgctcactgccagccgtctgcaggttcgtaagaagaactcgctgaaggactgcgtggcagtggctgggcccctcggggtcacacactttctgatcctgagcaaaacagagaccaatgtctactttaagctgatgcgcctcccaggaggccccaccttgaccttccaggtcaagaagtactcgctggtgcgtgatgtggtctcctcactgcgccggcaccgcatgcacgagcagcagtttgcccacccacccctcctggtactcaacagctttggcccccatggtatgcatgtgaagctcatggccaccatgttccagaacctgttcccctccatcaacgtgcacaaggtgaacctgaacaccatcaagcgctgcctcctcatcgactacaaccccgactcccaggagctggacttccgccactatagcatcaaagttgttcctgtgggcgcgagtcgcgggatgaagaagctgctccaggagaagttccccaacatgagccgcctgcaggacatcagcgagctgctggccacgggcgcggggctgtcggagagcgaggcagagcctgacggcgaccacaacatcacagagctgcctcaggctgtcgctggccgtggcaacatgcgggcccagcagagtgcagtgcggctcaccgagatcggcccgcggatgacactgcagctcatcaaggtccaggagggcgtcggggagggcaaagtgatgttccacagttttgtgagcaagacggaggaggagctgcaggccatcctggaagccaaggagaagaagctgcggctgaaggcgcagaggcaggcccagcaggcccagaatgtgcagcgcaagcaggagcagcgggaggcccacagaaagaagagcctggagggcatgaagaaggcacgggtcgggggtagtgatgaagaggcctctgggatcccttcaaggacggcgagcctggagttgggtgaggacgatgatgaacaggaagatgatgacatcgagtatttctgccaggcggtgggcgaggcgcccagtgaggacctgttccccgaggccaagcagaaacggcttgccaagtctccagggcggaagcggaagcggtgggaaatggatcgaggcaggggtcgcctttgtgaccagaagtttcccaagaccaaggacaagtcccagggagcccaggccaggcgggggcccagaggggcttcccgggatggtgggcgaggccggggccggggccgcccagggaagagagtggcctgagcccaagccgcaccggagcagcggctggattgaacgccccagattggggcccgagatgtggccctcggtttcctttcataaaggagttgtgtccccagcccttccactccagtaaagaactgaattggccagggaaaaaaaaaaaaaaaaa

SEQ ID NO: 284 - DNA, 2678 bp, Homo sapiens
  pyrroline-5-carboxylate reductase-like (PYCRL), pyrroline-5-carboxylate reductase 3 (P5CR 3, P5C reductase 3)
  CDS (31)...(891): PYCRL
ctagatctgtgggcggggcgcggcctgtggatgggcggtgagcgcagcggcgtccgaggcaacaagatggcagctgcggagccgtctccgcggcgcgtgggcttcgtgggcgcgggccgcatggcgggggccatcgcgcagggcctcatcagagcaggaaaagtggaagctcagcacatactggccagtgcaccaacagacaggaacctatgtcactttcaagctctgggttgccggaccacgcactccaaccaggaggtgctgcagagctgcctgctcgtcatctttgccaccaagcctcatgtgctgccagctgtcctggcagaggtggctcctgtggtcaccactgaacacatcttggtgtccgtggctgctggggtgtctctgagcaccctggaggagctgctgcccccaaacacacgggtgctgcgggtcttgcccaacctgccctgtgtggtccaggaaggggccatagtgatggcgcggggccgccacgtggggagcagcgagaccaagctcctgcagcatctgctggaggcctgtgggcggtgtgaggaggtgcctgaagcctacgtcgacatccacactggcctcagtggcagtggcgtggccttcgtgtgtgcattctccgaggccctggctgaaggagccgtcaagatgggcatgcccagcagcctggcccaccgcatcgctgcccagaccctgctggggacggccaagatgctgctgcacgagggccaacacccagcccagctgcgctcagacgtgtgcaccccgggtggcaccaccatctatggactccacgccctggagcagggcgggctgcgagcagccaccatgagcgccgtggaggctgccacctgccgggccaaggagctcagcagaaagtaggctgggctctggccatcctttcctgcctctgtgcccctgcctctccctgtgtcccttcccctgaggactgcggctccctccctcctgcatgagggtctcctactgctccttctccccttgcacagggaaatgcagggggcaggacttgggaggttccagcaggcgggggagccccgaccagtggggacactcctccctccccagtgagcagaaggcaccgtggtggtggctctgccccttgctgcagtgagcccaccttgctgcaacattggttctgaggggcccaagagatggcgtcttggtcatttgcccgcatggttgggcagttggttgaggccatgaacagaacttacggtaacaggcacggctggcccaatgcctggtctggagctggagcttgcctttggctttccaggtggctccgtgcagctacagccaggccggctgcctcatctcagctctagggggcacgagccatatggggtctgcacaagagaccctctcccctgcagtaaagccaggggccctggcctgatggggcccccatggggagctggagcctgccctgcagcctggagaagagggtggctgtggtgggcgtgctcatcccctgctaaggagcaggagctgctgggccaggtctgcggcagtgctggggtggcaccaggtgggcagtggtaggtggggtggcttgaggtctgggagggtggccctggccagccaggacacatgcagacccctggctttagtctggatacaggctccctctttcctcccaatcctaagctcctgacaagtggccaggtggctctgggccctcctgccccgtgcctaggtcaggggtcctggaataccccgtagctctggcaccaccacactggcctctgatggcaagacttggcccctccacctgtccctaacggacggcaggtcaggaaagccaggactcaggggagaagcaaacccccaggattgaaggctagggttctagggcctttgggtggggagggcccgggccggacagcctcagctccgtcccctgccccacaagattcacctgggcctccagtcccacgctggccccaactgctgcagctctcggcttccgcccaacagcctctggaggtgaggcgggagcatgccctcagcgaggctgggcggcgggtcctgctgtgccatctccctgtgcgcctgagcagatcaatccaccagtgcaaaacagggctaacggcacctgcaggacagcagcacgctccatccctcatgctcagctgcctctgcggccacggacttctgcccttcatctgctctctcttactctcctgagcctagcccgtccgtaagctccctcccctgcctggttcccagggcaggctgactcagttgactgcttggtccaagcctggccctggcacttgtcagggtcagcctaaggagatgggaataaagaggccagagagcaccaagtgagctcatgtttcaccagaggtggataaaaccaagttctgggctgggcccagtggctcacatctgtaattccagcactttgggaggccgaggcgggcagatcacaaagtcaggagtttgagaccaacctgaccaacatggagaaaccccatctctactaaaaatacaaaattagctggatgtggtggtgcgtgcctgtaatcccagctacttgggaggctgaggcaggagaattgcttgaatccaggaggcggagattgcagagagccaagatcatgccactgcactccagcctgggtgacagcaagactctgtcttgg

SEQ ID NO: 285 - DNA, 3757 bp, Homo sapiens
  gem (nuclear organelle) associated protein 4 (GEMIN4), component of gems 4, HCC-associated protein 1 (HCAP1), HC56, HHRF-1, p97
  CDS (120)...(3296): GEMIN4
aggcctaagcgcggccgccgtggctcctgcgtctcccatcgtgccgtgcgtcccgcgccgcgttcgagttctcggaggggagggggcgttagccccgcgcagccgccggcgtcgccgccatggacctaggacccttgaacatctgtgaagaaatgactattctgcatggaggcttcttgctggccgagcagctgttccaccctaaggcactggcagaattaacaaagtctgactgggaacgtgttggacggcccatcgtggaggccttaagggagatctcctcggctgcagcacactcccagccctttgcctggaagaagaaagccctgatcatcatctgggccaaggttctgcagccgcaccccgtgaccccgtccgacacagagacacggtggcaggaagacctgttcttctcggtgggcaacatgatccccaccatcaaccacaccatcctcttcgagctgctcaaatccctggaagcttctggactctttatccagctcctgatggccctgcccaccaccatctgccatgcagaactagagcgctttctggaacatgtgaccgttgacacttctgccgaagacgtggccttcttcctggacgtctggtgggaggtgatgaagcacaagggtcacccgcaggaccccctgctctcccagtttagtgcaatggcccataagtacctgcctgccttagatgagttcccccatcctccaaagaggcttaggtcagacccagacgcgtgccccaccatgcccctgttggccatgctgctccgcgggctgacacagatccagagtcggatcctgggcccggggaggaagtgctgtgcgctggccaacctggctgacatgctgactgtgtttgcgctgacagaggacgacccccaggaggtgtctgcaaccgtgtatctggacaaactggccacggtgatctctgtgtggaactcggacacccagaatccctaccaccagcaggcgctggcagagaaggtgaaggaggcagaacgggatgtcagcctgacctcgctggccaaactccccagtgagaccattttcgtgggctgcgagttcctgcaccacctgctgcgggagtggggggaggagttgcaggccgtgctccgcagcagccaggggacaagttacgacagctaccggctgtgcgacagtctgacttccttcagccagaacgcgacgctctacctgaaccgcaccagcctgtccaaggaggacaggcaggtggtctctgagctggcggagtgtgtcagggacttcctgaggaaaacgagcacggtgctgaagaacagggccttggaggatatcacagcttccattgccatggccgtcatccagcagaagatggaccgccatatggaagtgtgctacatttttgcctctgagaagaagtgggccttctcggacgagtgggtagcctgcctggggagtaacagggccctcttccgacagccagacttggtgttgaggctgctggaaacagtgatagacgtcagcacagctgacagagccatccctgagtctcagatccggcaggtgatccacctgatcctggaatgttacgcagacctctccctgccaggtaaaaataaagtccttgcaggtatcctgcgttcctgggggcgaaagggcctctctgaaaagttgctggcttatgtggagggttttcaggaagacctcaatacaacttttaaccagctcactcagagtgcctccgaacagggcttggcaaaagctgtggcctccgtggcccgcctggtcatagtgcacccggaagtcacggtgaagaaaatgtgcagcctggctgtggtcaatctcggcacccacaagttcctggcccagattctcactgccttccctgcccttaggtttgtggaagagcagggtcccaattcatctgccactttcatggtgtcatgcctcaaagaaaccgtctggatgaagttctctacacccaaggaagaaaagcaatttttagagctcctgaactgcctgatgagtcccgtgaaaccccaagggattccagtggctgctcttcttgagccagacgaggtgctgaaggaatttgtcctgcctttcttgaggttagatgttgaagaggtagacctcagtctgaggatcttcatccagactctagaggcaaacgcgtgccgagaggaatactggctccagacctgctccccgtttccactcctcttcagcttgtgccagctcttggaccgcttcagcaaatactggcagcttcccaaggagaagcggtgcctctctttggataggaaggatctagcgatccatatcctggagctcctgtgtgagattgtatcagccaatgctgagaccttctccccggatgtctggatcaagtccctgtcctggctccaccgcaagttagaacagctagactggactgtgggcctgaggctgaagagcttcttcgaggggcacttcaagtgtgaagtgccagccacactttttgagatctgtaagctttcagaagacgagtggacctcccaggcccacccagggtacggggctggcacggggctcctggcctggatggagtgctgctgcgtctccagcggcatctcggagaggatgctgtctctcttggtggtggacgtgggcaatcctgaggaggtcagactgttcagcaaaggctttctggtggccctggtgcaagtcatgccttggtgcagccctcaggagtggcagcgccttcaccagctgaccaggagactgctggagaagcagctcctccatgtcccttatagcctggaatatattcagtttgttcccctgctcaacctgaagccctttgcccaggagttgcaactctccgtcctcttcctgaggactttccagtttctctgcagccatagctgtcgtgattggcttcctctggaaggctggaaccacgtggtcaaactcctctgtggcagtctgacccgcctcctggactcagtcagggcgatacaggcagctggcccttgggttcaaggaccagagcaggacctgacccaggaagccctgtttgtttacacccaggtgttctgccatgctctgcacatcatggccatgctccacccggaggtctgtgagccactctacgttttagccttggaaaccctcacctgctatgagactttgagcaagaccaacccttctgtcagctccttgctccagagggcacacgagcagcgcttcttaaagtccattgctgagggcatcggccctgaagaacggcgccaaaccctgttgcagaagatgagcagcttctgacttggcgtggggagctgggccccaacatggcgggtctgcagaagatcagcagcttcttacctgtgcgggagcgaaaaagctgggcttcaacatggcaggtctgtaggggtcagacccgagcagcctggactttacagttatgtgaaactgtccacaaaaagtcatggcaataatggtgtaaagaaaatagtttcttgggtatttgtaacgtacaaactatcataaaaattctcctctttcgcatctcactttgtctcttctaagtcggcctcagcaatagcccaggattaaatatgctctgaaattgggtttagtgtcttcaagatcaaatccagccaggaggaacatgttcataactggacttttccatcctagattttggcaaataagcccaaagttgaaaccatgtgagtggaaaaagcattacatggtacgtataacccccaaaaaaaaaaaaaaaa

SEQ ID NO: 286 - DNA, 1048 bp, Homo sapiens
  tumor necrosis factor receptor superfamily, member 12A (TNFRSF12A), type I transmembrane protein Fn14, FGF-inducible 14, fibroblast growth factor-inducible immediate-early response protein 14 (FN14), tweak-receptor (TWEAKR), CD266
  CDS (87)...(476): TNFRSF12A
aaggcgggggcgggggcggggcggcggccgtgggtccctgccggccggcggcgggcgcagacagcggcgggcgcaggacgtgcactatggctcggggctcgctgcgccggttgctgcggctcctcgtgctggggctctggctggcgttgctgcgctccgtggccggggagcaagcgccaggcaccgccccctgctcccgcggcagctcctggagcgcggacctggacaagtgcatggactgcgcgtcttgcagggcgcgaccgcacagcgacttctgcctgggctgcgctgcagcacctcctgcccccttccggctgctttggcccatccttgggggcgctctgagcctgaccttcgtgctggggctgctttctggctttttggtctggagacgatgccgcaggagagagaagttcaccacccccatagaggagaccggcggagagggctgcccagctgtggcgctgatccagtgacaatgtgccccctgccagccggggctcgcccactcatcattcattcatccattctagagccagtctctgcctcccagacgcggcgggagccaagctcctccaaccacaaggggggtggggggcggtgaatcacctctgaggcctgggcccagggttcaggggaaccttccaaggtgtctggttgccctgcctctggctccagaacagaaagggagcctcacgctggctcacacaaaacagctgacactgactaaggaactgcagcatttgcacaggggaggggggtgccctccttcctagaggccctgggggccaggctgacttggggggcagacttgacactaggccccactcactcagatgtcctgaaattccaccacgggggtcaccctggggggttagggacctatttttaacactagggggctggcccactaggagggctggccctaagatacagacccccccaactccccaaagcggggaggagatatttattttggggagagtttggaggggagggagaatttattaataaaagaatctttaactttaaaaaaaaaaaaaaaaaa

SEQ ID NO: 287 - protein, 4 aa, Artificial Sequence
  synthetic DEAD box
DEAD
